(19) United States
(12) Patent Application Publication
(10) Pub. No.: US 2011/0119795 A1
(43) Pub. Date: May 19, 2011

(54) ARTIFICIAL PLANT MINICHROMOSOMES

(75) Inventors: EVGUENI ANANIEV, JOHNSON, IA (US); Olga N. Danilevskaya, Johnston, IA (US); MARK A. CHAMBERLIN, WINDSOR HEIGHTS, IA (US); WILLIAM J. GORDON-KAMM, URBANDALE, IA (US); SERGEI SVITASHEV, Johnston, IA (US); CHENGCANG WU, Middleton, IA (US)

(73) Assignee: PIONEER HI BRED INTERNATIONAL INC

(21) Appl. No.: 12/894,871

(22) Filed: Sep. 30, 2010

Related U.S. Application Data
(63) Continuation of application No. 12/181,380, filed on Jul. 29, 2008, now abandoned.
Application No. 12/181,380 is a continuation-in-part of application No. 12/142,953, filed on Jun. 20, 2008, now abandoned.
Application No. 12/142,953 is a continuation of application No. 11/804,325, filed on May 17, 2007.
(60) Provisional application No. 60/801,004, filed on May 17, 2006.

(51) Int. Cl. A01H 5/00; C07H 21/04; C12N 5/10

(52) U.S. Cl. 800/306; 536/23.6; 435/419; 435/412; 435/416; 435/415; 800/298; 800/320.1; 800/320.2; 800/320.3; 800/320; 800/312; 800/322; 800/314

(57) ABSTRACT

Artificial plant minichromosomes comprising a functional centromere which specifically bind centromeric protein C (CENPC) and methods for making such minichromosomes are described.

### CROSS-REFERENCE TO RELATED APPLICATIONS

[0001] This application is a continuation-in-part of co-pending applications U.S. Ser. No. 12/142,953 filed Jun. 20, 2008, and U.S. Ser. No. 11/804,325 filed May 17, 2007, which claim the benefit of U.S. Provisional Application No. 60/801,004 filed May 17, 2006, the entire contents of which are each herein incorporated by reference.

### FIELD OF THE INVENTION

[0002] This invention is in the field of plant biotechnology; in particular, this pertains to artificial minichromosomes and to methods of making such minichromosomes in a plant.

### BACKGROUND

[0003] Recent advances in chromosome engineering have made it possible to alter the genome of plant, thus, altering its phenotype. When a transgene is integrated into a plant genome, it is usually in a random fashion and in an unpredictable copy number. Accordingly, research efforts have been directed toward better controlling transgene integration.

[0004] Given this need, researchers have wondered if the answer might lie in the use of artificial minichromosomes. These are man-made linear or circular DNA molecules constructed from cis-acting DNA sequence elements that provide replication and partitioning of the constructed minichromosomes.

[0005] It is believed that production of artificial chromosomes would reduce or eliminate some issues associated with random genomic integrations into a native plant chromosome, for example linkage drag due to association of the transgene with genomic material from the host plant. Artificial chromosomes may also provide means to deliver 10-100 times more genes than standard transformation vectors, and to provide large chromosomal segments for complementation and/or map-based cloning.

[0006] Three components have been identified for artificial chromosome replication, stability, and maintenance/inheritance: (i) autonomous replication sequences which function as an origin of replication; (ii) telomeres which function to stabilize and maintain the ends of linear chromosomes; and, (iii) centromeres which are the site of kinetochore assembly for proper chromosome segregation in mitosis and meiosis. Isolated centromeres from unicellular organisms, such as yeast, do not function in higher eukaryotes.

[0007] U.S. Pat. No. 5,270,201, issued to Richards, et al., on Dec. 14, 1993, describes plant artificial chromosomes based on telomeres and, optionally, a centromere.

[0008] U.S. Pat. No. 7,119,250, issued to Luo, et al., on Oct. 10, 2006, describes plant centromere compositions.

[0009] U.S. Pat. No. 7,132,240, issued to Richards, et al., on Nov. 7, 2006, describes a method to isolate methylated centromere DNA potentially from any centromere in an organism.

[0010] U.S. Pat. No. 7,193,128, issued to Copenhaver, et al., on Mar. 20, 2007, describes a method for generating or increasing revenue from crops using nucleic acid sequences of plant centromeres.

[0011] PCT Application having publication number WO 2007/030510 that was published on Mar. 15, 2007 describes methods of making plants transformed with autonomous minichromosomes.

### SUMMARY

[0012] The present invention concerns an artificial plant minichromosome comprising a functional centromere containing: (a) at least two arrays of tandem repeats of CentC in an inverted orientation wherein the first array comprises at least fifty copies of CentC and the second array comprises at least fifty copies of CentC; and, (b) at least one copy of a retrotransposable element, wherein the retrotransposable element is situated between the first and the second array.

[0013] In a second embodiment, an artificial plant minichromosome of the invention comprises a retrotransposable element selected from the group consisting of CentA, CRM1, and CRM2. In a third embodiment, the artificial plant minichromosome of the invention also comprises at least one functional telomere.

[0014] In a fourth embodiment, the functional centromere, comprised by the artificial plant minichromosome specifically binds centromeric protein C (CENPC).

[0015] In a fifth embodiment, a corn plant can comprise any of the artificial minichromosomes of the invention.

[0016] In a sixth embodiment, the present invention concerns an artificial plant minichromosome comprising a functional centromere, wherein the centromere specifically binds centromeric protein C (CENPC).

[0017] In a seventh embodiment, the invention concerns an isolated polynucleotide comprising: (a) at least two arrays of tandem repeats of CentC in an inverted orientation wherein the first array comprises at least ten copies of CentC and the second array comprises at least ten copies of CentC; and, (b) at least one copy of a retrotransposable element, wherein the retrotransposable element is situated between the first and the second array.

[0018] In an eighth embodiment, the isolated polynucleotide of the invention comprises a retrotransposable element which is selected from the group consisting of CentA, CRM1, and CRM2.

[0019] In a ninth embodiment, the invention concerns an isolated polynucleotide comprising: (a) at least one array of tandem repeats of CentC, the array comprising at least 10 copies of CentC; and, (b) at least one copy of a retrotransposable element selected from the group consisting of CentA, CRM1, and CRM2.

[0020] In a tenth embodiment, the invention concerns an isolated polynucleotide comprising: (a) at least one array of tandem repeats of CentC, the array comprising at least 10 copies of CentC; and, (b) at least one copy each of CentA, CRM1, and CRM2.

[0021] In an eleventh embodiment, the invention concerns a recombinant construct comprising any of the isolated polynucleotides of the invention as well as a transgenic corn plant comprising such recombinant constructs.

[0022] In a twelfth embodiment, the invention concerns a method for making a transgenic corn plant comprising an artificial plant minichromosome having a functional centromere the method comprising:

[0023] (a) contacting at least one corn plant cell with a mixture comprising a recombinant construct of the invention;

[0024] (b) identifying at least one corn plant cell from step (a) comprising an artificial plant minichromosome having a functional centromere; and

[0025] (c) regenerating a fertile corn plant from the corn plant cell of step (b) wherein said corn plant comprises an artificial plant minichromosome having a functional centromere. The mixture can also comprise a polynucleotide encoding a polypeptide for stimulating cell growth wherein the polypeptide is selected from the group consisting of a wuschel, a baby boom, a RepA, or a Lec1.

### BRIEF DESCRIPTION OF THE DRAWINGS

[0026] The invention can be more fully understood from the following detailed description and the accompanying drawings and Sequence Listing, which form a part of this application.

[0027] FIG. 1. Fluorescent in situ hybridization (FISH) on a mitotic chromosomal spread of maize embryogenic calli from Hi-II transformation CMC3 pool 1 event #14. Calli were derived from immature embryos transformed with linearized BAC clone pool 1 retrofitted with Tn5-3. Prometaphase (left) and metaphase (right) nuclei both show the 20 native chromosomes plus 1 minichromosome (arrows and insets). Both minichromosomes are positive for the CentC (green—color; white—greyscale) centromere-specific repeat and the unique marker probe 23715 (red—color; white—greyscale) specific to the transformation construct, with both CentC and 23715 being essentially colocalized in the minichromosome (insets).

[0028] FIG. 2. FISH on a mitotic chromosomal spread of maize embryogenic calli from Hi-II transformation CMC3 pool 1 event #14. Calli were derived from immature embryos transformed with linearized BAC clone pool 1 retrofitted with Tn5-3. Panel A shows a metaphase nucleus showing the 20 native chromosomes plus 2 minichromosomes (box). Both minichromosomes are positive for the CentC (green—color; white—greyscale) centromere-specific repeat and the unique marker probe 23715 (red—color; white—greyscale) specific to the transformation construct. Panels B-D are higher magnification of the box showing the minichromosomes (arrowheads) with: B—DAPI only; C—DAPI+23715 probe (red—color; white—greyscale); and D—DAPI+CentC probe (green—color; white—greyscale).

[0029] FIG. 3. Immunofluorescence on a mitotic chromosomal spread of maize embryogenic calli from Hi-II transformation CMC3 pool 1 event #14. Calli were derived from immature embryos transformed with linearized BAC clone pool 1 retrofitted with Tn5-3. Panel A shows a metaphase nucleus showing the 20 native chromosomes plus 1 minichromosome (arrow). All centromeres of the native chromosomes and the minichromosome are positive for Centromeric Protein C, CENPC (red—color; white—greyscale), a centromere/kinetochore-specific protein. Panels B-C show higher magnification of the minichromosome with: B—DAPI only; and C—DAPI+CENPC (red—color; white—greyscale). The morphology and immunolocalization of CENPC indicates that the minichromosome is composed of two sister chromatids each having a functional centromere.

[0030] FIG. 4. Panel A—Immunofluorescence on a mitotic chromosomal spread of maize embryogenic calli from Hi-II transformation CMC3 pool 1 event #14. Calli were derived from immature embryos transformed with linearized BAC clone pool 1 retrofitted with Tn5-3. Separation of sister chromatids of the native chromosomes and the minichromosome (box) was observed during anaphase. All centromeres of the native chromosomes and the minichromosome are positive for Centromeric Protein C, CENPC (red—color; white—greyscale) a centromere/kinetochore-specific protein. Panel B is a high magnification image of the box in A, showing the separation of the minichromosome sister chromatids (double arrow) indicating that the minichromosome, like normal chromosomes, can segregate during mitosis.

[0031] FIG. 5. FISH on a mitotic chromosomal spread of maize embryogenic calli from Hi-II transformation CMC3 pool 3 event #12. Calli were derived from immature embryos transformed with linearized BAC clone pool 3 retrofitted with Tn5-3. A tetra-aneuploid (39 chromosomes, lacking one copy of ch 6) metaphase nucleus showing the native chromosomes plus 1 minichromosome (arrow) is shown. The minichromosome is positive for the CentC (green—color; white—greyscale) centromere-specific repeat and the unique marker probe 23715 (red—color; white—greyscale) specific to the transformation construct. Panels B-D are higher magnification of the boxed area showing the minichromosome (arrowheads) and a native chromosome with: A—DAPI only; B—DAPI+CentC probe (green—color; white—greyscale); and D—DAPI+23715 probe (red—color; white—greyscale). Bipolar localization of CentC repeats as revealed by FISH staining at the minichromosome indicates that it is composed of two sister chromatids similar to that observed in the native chromosomes.

[0032] FIG. 6. FISH on a mitotic chromosomal spread of maize embryogenic calli from Hi-II transformation CMC3 pool 3 event #12. Calli were derived from immature embryos transformed with linearized BAC clone pool 3 retrofitted with Tn5-3. Panel A—Tetra-aneuploid (39 chromosomes, lacking one copy of ch 6) metaphase nucleus showing the native chromosomes plus 2 minichromosomes (arrows). Minichromosomes are positive for both the CentC (green—color; white—greyscale) centromere-specific repeat and the unique marker probe 23715 (red—color; white—greyscale) specific to the transformation construct. Panel B is a high magnification image of the 2 minichromosomes showing variation in the abundance of CentC repeats and the unique marker 23715.

[0033] FIG. 7. FISH on a mitotic chromosomal spread of maize embryogenic calli from Hi-II transformation CMC3 pool 3 event #12. Calli were derived from immature embryos transformed with linearized BAC clone pool 3 retrofitted with Tn5-3. Panel A—Tetra-aneuploid (39 chromosomes, lacking one copy of ch 6) nucleus showing separation of sister chromatids of the native chromosomes and the two minichromosomes (box) at early anaphase. The sister chromatids of both minichromosomes are positive for the CentC (green—color; white—greyscale) centromere-specific repeat and the unique marker probe 23715 (red—color; white—greyscale) specific to the transformation construct. Panels B-C are high magnification images of the 2 minichromosomes (double arrows) showing: B—DAPI+CentC probe (green—color; white—greyscale); and C—DAPI+23715 probe (red—color; white—greyscale). Separation of the minichromosome sister chromatids at anaphase suggests the presence of functional centromeres, allowing for segregation during mitosis.

[0034] FIG. 8. Immunofluorescence on a mitotic chromosomal spread of maize embryogenic calli from Hi-II transformation CMC3 pool 3 event #12. Calli were derived from immature embryos transformed with linearized BAC clone pool 3 retrofitted with Tn5-3. Panel A shows a tetra-aneuploid (39 chromosomes, lacking one copy of ch 6) metaphase nucleus showing 39 native chromosomes plus 2 minichromosomes (arrows). All centromeres of the native chromosomes and the minichromosomes are positive for Centromeric Protein C, CENPC (red—color; white—greyscale) a centromere/kinetochore-specific protein. Panels B-C are high magnification images of the minichromosomes. The pattern of CENPC immunolocalization, two foci per minichromosome, indicates that the minichromosome is composed of two sister chromatids and each has a functional centromere able to form a kinetochore complex.

[0035] FIG. 9. FISH on a mitotic chromosomal spread from root tips of a plant regenerated from a Hi-II maize transformation event. Plants were derived from immature embryos transformed with linearized bacm.pk128.j21 retrofitted with Tn5-3. Panel A shows an aneuploid metaphase nucleus showing 19 native chromosomes plus 1 minichromosome (arrow). The minichromosome is positive for the CentC (green—color; white—greyscale) centromere-specific repeat and the unique marker probe 23715 (red—color; white—greyscale) specific to the transformation construct. Panels B-D are higher magnifications of the minichromosome with: B—DAPI only; C—DAPI+CentC probe (green—color; white—greyscale); and D—DAPI+23715 probe (red—color; white—greyscale).

[0036] FIG. 10. Immunofluorescence on a mitotic chromosomal spread from root tips of a plant regenerated from a Hi-II maize transformation event. Plants were derived form immature embryos transformed with linearized bacm.pk128.j21 retrofitted with Tn5-3. Panel A shows an aneuploid metaphase nucleus showing 19 native chromosomes plus 1 minichromosome (arrow). All centromeres of the native chromosomes and the minichromosome are positive for Centromeric Protein C, CENPC (red—color; white—greyscale), a centromere/kinetochore-specific protein. Panels B-C are higher magnification of the minichromosome with: B—DAPI only; and C—DAPI+CENPC. The pattern of CENPC immunolocalization, two foci per minichromosome, indicates that the minichromosome is composed of two sister chromatids and each has a functional centromere able to form a kinetochore complex.

[0037] FIG. 11. Fine structure of corn centromeres revealed by fiber-FISH. Four centromeric repeats, CentC (green—color; white—greyscale) and a sum of CentA, CRM1, and CRM2 (red—color; grey—greyscale) were used in multi-color FISH on extended DNA fibers of oat-maize addition lines containing individual corn chromosomes. This revealed megabase-long hybridization stretches, which are unique for each chromosome.

[0038] FIG. 12. Model of a corn centromere. Centromeric organization is shown using maize centromeric repeat nomenclature. Uninterrupted arrays of CentC can be composed of several hundred to thousands of repeat elements. Other maize centromere-specific retrotransposable elements such as CentA, CRM1, and/or CRM2 can be integrated into a CentC array, into each other, and/or into itself in centromeric regions. In addition to centromere-specific retrotransposons, other retrotransposons can be integrated in the array, into elements such as CentA, CentC, CRM1, and CRM2, and/or into itself to form inserts which interrupt CentC tandem repeat arrays. This figure shows one model of the organization of maize CentC elements (arrowheads) forming two arrays of tandem head-to-tail repeats. The CentC arrays can be found in an inverted orientation to form a large segment of the centromeric DNA. Fiber-FISH along with FISH on meiotic anaphase chromosomes and blot-hybridization analysis of cloned centromeric DNA segments indicated that regions with high density of all four centromeric repeats (CentC, CRM1, CentA, and CRM2) are involved in formation of the kinetochore.

[0039] FIG. 13. Retrofitting and conversion of a BAC clone into a linear artificial minichromosome in vitro. BAC clone DNA is retrofitted with custom-made transposon Tn5-3 comprising ampicillin resistance gene (AP^{r}), origin of replication (ori), selectable (MO-PAT) and visual (DS-RED2) markers under ubiquitin promoter (UBI1ZM PRO), telomeric sequences (TEL) in reverse orientation separated by a kanamycin resistance gen (KAN^{r}) gene, and sites for homing restriction enzymes I-Ppo I, I-Ceu I, and PI-Sce I. ME stands for transposon mosaic ends. Digestion of the BAC construct with homing restriction enzyme I-Ceu I converts a circular BAC into a linear DNA molecule flanked with telomeric sequences.

[0040] FIG. 14. Metaphase nucleus of callus from CMC3 pool 1 event #14 probed for centromere and telomere elements. FISH analysis was done using fluorescently labeled probes for the centromere-specific CentC repeat (green—color; white—greyscale) and the telomere-specific telo-31 repeat (red—color; white—greyscale). Localization of these probes is noted for a native chromosome, CentC is denoted by asterisks (*), and telo-31 denoted by double arrows. Panels B-E show higher magnification of the minichromosome. Panel B—DAPI+Cent C+telo31 (green/red—color; white—greyscale); C—DAPI only; D—DAPI+CentC probe (green—color; white—greyscale); and E—DAPI+23715 probe (red—color; white—greyscale). The pattern of telo-31 hybridization suggests that the minichromosome (arrow) has functional telomeres similar to the native chromosomes.

[0041] FIG. 15. Metaphase nucleus of callus from CMC3 subpool 1.3 event #27 probed for centromere and telomere elements. FISH analysis was done using fluorescently labeled probes for the centromere-specific CentC repeat (green—color; white—greyscale) and the telomere-specific telo-31 repeat (red—color; white—greyscale). Localization of these probes is noted for a native chromosome, CentC is denoted by asterisks (*), and telo-31 denoted by double arrows. Panels B-E show higher magnification of the minichromosome. Panel B—DAPI+Cent C+telo-31 (green/red—color; white—greyscale); C—DAPI only; D—DAPI+CentC probe (green—color; white—greyscale); and E—DAPI+23715 probe (red—color; white—greyscale). The pattern of telo-31 hybridization suggests that the minichromosome (arrow) has functional telomeres similar to the native chromosomes.

### DETAILED DESCRIPTION

[0042] The disclosure of each reference set forth herein is hereby incorporated by reference in its entirety.

[0043] As used herein and in the appended claims, the singular forms “a”, “an”, and “the” include plural reference unless the context clearly dictates otherwise. Thus, for example, reference to “a plant” includes a plurality of such plants; reference to “a cell” includes one or more cells and equivalents thereof known to those skilled in the art, and so forth.

[0044] In the context of this disclosure, a number of terms and abbreviations are used. The following definitions are provided.

[0045] “Open reading frame” is abbreviated ORF.

[0046] “American Type Culture Collection” is abbreviated ATCC.

[0047] The term “artificial plant minichromosome” as used herein refers to any artificially created chromosome comprising a centromere and telomeres that possesses properties comparable to those of a native chromosome, such as replication and segregation during mitosis and meiosis and therefore autonomous and transmissible in cell division. The terms artificial minichromosome, minichromosome, and artificial chromosome are used interchangeably herein.

[0048] The term “functional centromere” refers to the spindle attachment region of a eukaryotic chromosome that functions in a manner comparable to centromeres in a native chromosome. It is the most condensed and constricted region of a chromosome, to which the spindle fiber is attached during mitosis. During mitosis in a typical plant or animal cell, each chromosome divides longitudinally into two sister chromosomes that eventually separate and travel to opposite poles of the mitotic spindle. At the beginning of mitosis, when the sister chromosomes have split but are still paired, every chromosome attaches to the spindle at a specific point along its length. That point is referred to as the centromere or spindle attachment region. Centromeres are composed of highly repetitive DNA, that is, DNA sequences that are present in a genome in many copies.

[0049] The term “array” refers to an orderly arrangement of elements.

[0050] The term “tandem repeat” refers to multiple copies of the same base sequence in the same orientation. Thus, these are copies of sequences of nucleotides, which are repeated over and over again a number of times in tandem, for example, along a chromosome. Any array of tandem repeats may comprise multiple copies of a single element, or may have at least one other element interspersed within the array, or within an element of the array.

[0051] The term “inverted orientation” refers to two or more copies of the same sequence present in an inverted form.

[0052] The terms “retrotransposable element” and “retrotransposon” are used interchangeably herein and refer to a genetic element that transposes to a new location in DNA by first making an RNA copy of itself, then making a DNA copy of this RNA with a reverse transcriptase, and then inserting the DNA copy into the target DNA. Retrotransposons are genetic elements than can amplify themselves in a genome and are ubiquitous components of the DNA of many eukaryotic organisms. They are a subclass of transposon. They are particularly abundant in plants, where they are often a principal component of nuclear DNA.

[0053] The term “functional telomere” refers to structures found at the ends of chromosomes in the cells of eukaryotes. Telomeres function by protecting chromosome ends from recombination, fusion to other chromosomes, or degradation by nucleases. They permit cells to distinguish between random DNA breaks and chromosome ends. They also play a significant role in determining the number of times that a normal cell can divide. A telomere is a region of highly repetitive DNA at the end of a linear chromosome that functions as a disposable buffer. Every time linear eukaryotic chromosomes are replicated during late S-phase the DNA polymerase complex is incapable of replicating all the way to the end of the chromosome; if it were not for telomeres, this would quickly result in the loss of vital genetic information, which is needed to sustain a cell's activities.

[0054] As used herein, “nucleic acid” means a polynucleotide and includes single or double-stranded polymer of deoxyribonucleotide or ribonucleotide bases. Nucleic acids may also include fragments and modified nucleotides. Thus, the terms “polynucleotide”, “nucleic acid sequence”, “nucleotide sequence” or “nucleic acid fragment” are used interchangeably to denote a polymer of RNA or DNA that is single or double-stranded, optionally containing synthetic, non-natural or altered nucleotide bases. Nucleotides (usually found in their 5′-monophosphate form) are referred to by their single letter designation as follows: “A” for adenosine or deoxyadenosine (for RNA or DNA, respectively), “C” for cytosine or deoxycytosine, “G” for guanosine or deoxyguanosine, “U” for uridine, “T” for deoxythymidine, “R” for purines (A or G), “Y” for pyrimidines (C or T), “K” for G or T, “H” for A or C or T, “I” for inosine, and “N” for any nucleotide.

[0055] The terms “subfragment that is functionally equivalent” and “functionally equivalent subfragment” are used interchangeably herein. These terms refer to a portion or subsequence of an isolated nucleic acid fragment in which the ability to alter gene expression or produce a certain phenotype is retained whether or not the fragment or subfragment encodes an active enzyme. For example, the fragment or subfragment can be used in the design of chimeric genes to produce the desired phenotype in a transformed plant. Chimeric genes can be designed for use in suppression by linking a nucleic acid fragment or subfragment thereof, whether or not it encodes an active enzyme, in the sense or antisense orientation relative to a plant promoter sequence.

[0056] The term “conserved domain” or “motif” means a set of amino acids conserved at specific positions along an aligned sequence of evolutionarily related proteins. While amino acids at other positions can vary between homologous proteins, amino acids that are highly conserved at specific positions indicate amino acids that are essential in the structure, the stability, or the activity of a protein. Because they are identified by their high degree of conservation in aligned sequences of a family of protein homologues, they can be used as identifiers, or “signatures”, to determine if a protein with a newly determined sequence belongs to a previously identified protein family.

[0057] The terms “homology”, “homologous”, “substantially similar”, “substantially identical”, and “corresponding substantially” are used interchangeably herein. They refer to nucleic acid fragments wherein changes in one or more nucleotide bases do not affect the ability of the nucleic acid fragment to mediate gene expression or produce a certain phenotype. These terms also refer to modifications of the nucleic acid fragments of the instant invention such as deletion or insertion of one or more nucleotides that do not substantially alter the functional properties of the resulting nucleic acid fragment relative to the initial, unmodified fragment. These terms also refer to amino acid sequences, polypeptides, or peptide fragments with or without modifications, deletions, insertions, or substitutions that do not substantially alter the functional properties relative to an initial unmodified sequence. It is therefore understood, as those skilled in the art will appreciate, that the invention encompasses more than the specific exemplary sequences.

[0058] Moreover, the skilled artisan recognizes that substantially similar nucleic acid sequences encompassed by this invention are also defined by their ability to hybridize (under moderately stringent conditions, e.g., 0.5×SSC, 0.1% SDS, 60° C.) with the sequences exemplified herein, or to any portion of the nucleotide sequences disclosed herein and which are functionally equivalent to any of the nucleic acid sequences disclosed herein. Stringency conditions can be adjusted to screen for moderately similar fragments, such as homologous sequences from distantly related organisms, to highly similar fragments, such as genes that duplicate functional enzymes from closely related organisms. Post-hybridization washes determine stringency conditions.

[0059] The term “selectively hybridizes” includes reference to hybridization, under stringent hybridization conditions, of a nucleic acid sequence to a specified nucleic acid target sequence to a detectably greater degree (e.g., at least 2-fold over background) than its hybridization to non-target nucleic acid sequences and to the substantial exclusion of non-target nucleic acids. Selectively hybridizing sequences typically have about at least 80% sequence identity, or 90% sequence identity, up to and including 100% sequence identity (i.e., fully complementary) with each other.

[0060] The term “stringent conditions” or “stringent hybridization conditions” includes reference to conditions under which a probe will selectively hybridize to its target sequence. Stringent conditions are sequence-dependent and will be different in different circumstances. By controlling the stringency of the hybridization and/or washing conditions, target sequences can be identified which are 100% complementary to the probe (homologous probing). Alternatively, stringency conditions can be adjusted to allow some mismatching in sequences so that lower degrees of similarity are detected (heterologous probing). Generally, a probe is less than about 1000 nucleotides in length, optionally less than 500 nucleotides in length.

[0061] Typically, stringent conditions will be those in which the salt concentration is less than about 1.5 M Na ion, typically about 0.01 to 1.0 M Na ion concentration (or other salts) at pH 7.0 to 8.3 and the temperature is at least about 30° C. for short probes (e.g., 10 to 50 nucleotides) and at least about 60° C. for long probes (e.g., greater than 50 nucleotides). Stringent conditions may also be achieved with the addition of destabilizing agents such as formamide. Exemplary low stringency conditions include hybridization with a buffer solution of 30 to 35% formamide, 1 M NaCl, 1% SDS (sodium dodecyl sulphate) at 37° C., and a wash in 1× to 2×SSC (20×SSC=3.0 M NaCl/0.3 M trisodium citrate) at 50 to 55° C. Exemplary moderate stringency conditions include hybridization in 40 to 45% formamide, 1 M NaCl, 1% SDS at 37° C., and a wash in 0.5× to 1×SSC at 55 to 60° C. Exemplary high stringency conditions include hybridization in 50% formamide, 1 M NaCl, 1% SDS at 37° C., and a wash in 0.1×SSC at 60 to 65° C.

[0062] Specificity is typically the function of post-hybridization washes, the critical factors being the ionic strength and temperature of the final wash solution. For DNA-DNA hybrids, the Tₘ can be approximated from the equation of Meinkoth, et al. ((1984) Anal Biochem 138:267-284): Tₘ=81.5° C.+16.6 (log M)+0.41 (% GC)−0.61 (% form)−500/L; where M is the molarity of monovalent cations, % GC is the percentage of guanosine and cytosine nucleotides in the DNA, % form is the percentage of formamide in the hybridization solution, and L is the length of the hybrid in base pairs. The Tₘ is the temperature (under defined ionic strength and pH) at which 50% of a complementary target sequence hybridizes to a perfectly matched probe. Tₘ is reduced by about 1° C. for each 1% of mismatching; thus, Tₘ, hybridization and/or wash conditions can be adjusted to hybridize to sequences of the desired identity. For example, if sequences with ≧90% identity are sought, the Tₘ can be decreased 10° C. Generally, stringent conditions are selected to be about 5° C. lower than the thermal melting point (Tₘ) for the specific sequence and its complement at a defined ionic strength and pH. However, severely stringent conditions can utilize a hybridization and/or wash at 1, 2, 3 or 4° C. lower than the thermal melting point (Tₘ); moderately stringent conditions can utilize a hybridization and/or wash at 6, 7, 8, 9 or 10° C. lower than the thermal melting point (Tₘ); low stringency conditions can utilize a hybridization and/or wash at 11, 12, 13, 14, 15 or 20° C. lower than the thermal melting point (Tₘ). Using the equation, hybridization and wash compositions, and desired Tₘ, those of ordinary skill will understand that variations in the stringency of hybridization and/or wash solutions are inherently described. If the desired degree of mismatching results in a Tₘ of less than 45° C. (aqueous solution) or 32° C. (formamide solution) it is preferred to increase the SSC concentration so that a higher temperature can be used. An extensive guide to the hybridization of nucleic acids is found in Tijssen, Laboratory Techniques in Biochemistry and Molecular Biology—Hybridization with Nucleic Acid Probes, Part I, Chapter 2 “Overview of principles of hybridization and the strategy of nucleic acid probe assays”, Elsevier, New York (1993); and Current Protocols in Molecular Biology, Chapter 2, Ausubel et al., Eds., Greene Publishing and Wiley-Interscience, New York (1995). Hybridization and/or wash conditions can be applied for at least 10, 30, 60, 90, 120 or 240 minutes.

[0063] The term “sequence identity” or “identity” in the context of nucleic acid or polypeptide sequences refers to the nucleic acid bases or amino acid residues in two sequences that are the same when aligned for maximum correspondence over a specified comparison window. The term “percentage of sequence identity” refers to the value determined by comparing two optimally aligned sequences over a comparison window, wherein the portion of the polynucleotide or polypeptide sequence in the comparison window may comprise additions or deletions (i.e., gaps) as compared to the reference sequence (which does not comprise additions or deletions) for optimal alignment of the two sequences. The percentage is calculated by determining the number of positions at which the identical nucleic acid base or amino acid residue occurs in both sequences to yield the number of matched positions, dividing the number of matched positions by the total number of positions in the window of comparison and multiplying the results by 100 to yield the percentage of sequence identity. Useful examples of percent sequence identities include, but are not limited to, 50%, 55%, 60%, 65%, 70%, 75%, 80%, 85%, 90% or 95%, or any integer percentage from 50% to 100%. These identities can be determined using any of the programs described herein.

[0064] Sequence alignments and percent identity or similarity calculations may be determined using a variety of comparison methods designed to detect homologous sequences including, but not limited to, the MegAlign™ program of the LASERGENE bioinformatics computing suite (DNASTAR Inc., Madison, Wis.). Within the context of this application it will be understood that where sequence analysis software is used for analysis, that the results of the analysis will be based on the “default values” of the program referenced, unless otherwise specified. As used herein “default values” will mean any set of values or parameters that originally load with the software when first initialized. The term “Clustal V method of alignment” corresponds to the alignment method labeled Clustal V (described by Higgins and Sharp, (1989) CABIOS 5:151-153; Higgins et al. (1992) Comput Appl Biosci 8:189-191) and found in the MegAlign™ program of the LASERGENE bioinformatics computing suite (DNASTAR Inc., Madison, Wis.). For multiple alignments, the default values correspond to GAP PENALTY=10 and GAP LENGTH PENALTY=10. Default parameters for pairwise alignments and calculation of percent identity of protein sequences using the Clustal method are KTUPLE=1, GAP PENALTY=3, WINDOW=5 and DIAGONALS SAVED=5. For nucleic acids these parameters are KTUPLE=2, GAP PENALTY=5, WINDOW=4 and DIAGONALS SAVED=4. After alignment of the sequences using the Clustal V program, it is possible to obtain a “percent identity” by viewing the “sequence distances” table in the same program. The term “Clustal W method of alignment” corresponds to the alignment method labeled Clustal W (described by Higgins and Sharp, (1989) CABIOS 5:151-153; Higgins et al. (1992) Comput Appl Biosci 8:189-191) and found in the MegAlign™ v6.1 program of the LASERGENE bioinformatics computing suite (DNASTAR Inc., Madison, Wis.). Default parameters for multiple alignment are GAP PENALTY=10, GAP LENGTH PENALTY=0.2, Delay Divergen Seqs (%)=30, DNA Transition Weight=0.5, Protein Weight Matrix=Gonnet Series, DNA Weight Matrix=IUB. After alignment of the sequences using the Clustal W program, it is possible to obtain a “percent identity” by viewing the “sequence distances” table in the same program. The term “BLASTN method of alignment” is an algorithm provided by the National Center for Biotechnology Information (NCBI) to compare nucleotide sequences using default parameters.

[0065] It is well understood by one skilled in the art that many levels of sequence identity are useful in identifying polypeptides, from other species, wherein such polypeptides have the same or similar function or activity. Useful examples of percent identities include, but are not limited to, 50%, 55%, 60%, 65%, 70%, 75%, 80%, 85%, 90% or 95%, or any integer percentage from 50% to 100%. Indeed, any integer amino acid identity from 50% to 100% may be useful in describing the present invention, such as 51%, 52%, 53%, 54%, 55%, 56%, 57%, 58%, 59%, 60%, 61%, 62%, 63%, 64%, 65%, 66%, 67%, 68%, 69%, 70%, 71%, 72%, 73%, 74%, 75%, 76%, 77%, 78%, 79%, 80%, 81%, 82%, 83%, 84%, 85%, 86%, 87%, 88%, 89%, 90%, 91%, 92%, 93%, 94%, 95%, 96%, 97%, 98% or 99%.

[0066] The term “gene” refers to a nucleic acid fragment that expresses a specific protein, including regulatory sequences preceding (5′ non-coding sequences) and following (3′ non-coding sequences) the coding sequence. “Native gene” refers to a gene as found in nature with its own regulatory sequences. “Chimeric gene” refers to any gene that is not a native gene, comprising regulatory and coding sequences that are not found together in nature. Accordingly, a chimeric gene may comprise regulatory sequences and coding sequences that are derived from different sources, or regulatory sequences and coding sequences derived from the same source, but arranged in a manner different than that found in nature. A “foreign” gene refers to a gene not normally found in the host organism, but that is introduced into the host organism by gene transfer. Foreign genes can comprise native genes inserted into a non-native organism, or chimeric genes. A “transgene” is a gene that has been introduced into the genome by a transformation procedure.

[0067] The term “genome” as it applies to a plant cells encompasses not only chromosomal DNA found within the nucleus, but organelle DNA found within subcellular components (e.g., mitochondria, or plastid) of the cell.

[0068] A “codon-optimized gene” or “codon-preferred gene” is a gene having its frequency of codon usage designed to mimic the frequency of preferred codon usage of the host cell.

[0069] An “allele” is one of several alternative forms of a gene occupying a given locus on a chromosome. When all the alleles present at a given locus on a chromosome are the same that plant is homozygous at that locus. If the alleles present at a given locus on a chromosome differ that plant is heterozygous at that locus.

[0070] The term “coding sequence” refers to a polynucleotide sequence that codes for a specific amino acid sequence. “Regulatory sequences” refer to nucleotide sequences located upstream (5′ non-coding sequences), within, or downstream (3′ non-coding sequences) of a coding sequence, and which influence the transcription, RNA processing or stability, or translation of the associated coding sequence. Regulatory sequences may include, but are not limited to: promoters, translation leader sequences, introns, polyadenylation recognition sequences, RNA processing sites, effector binding sites and stem-loop structures.

[0071] The term “promoter” refers to a DNA sequence capable of controlling the expression of a coding sequence or functional RNA. The promoter sequence consists of proximal and more distal upstream elements, the latter elements often referred to as enhancers. Accordingly, an “enhancer” is a DNA sequence that can stimulate promoter activity, and may be an innate element of the promoter or a heterologous element inserted to enhance the level or tissue-specificity of a promoter. Promoters may be derived in their entirety from a native gene, or be composed of different elements derived from different promoters found in nature, or even comprise synthetic DNA segments. It is understood by those skilled in the art that different promoters may direct the expression of a gene in different tissues or cell types, or at different stages of development, or in response to different environmental conditions. It is further recognized that since in most cases the exact boundaries of regulatory sequences have not been completely defined, DNA fragments of some variation may have identical promoter activity. Promoters that cause a gene to be expressed in most cell types at most times are commonly referred to as “constitutive promoters”. New promoters of various types useful in plant cells are constantly being discovered; numerous examples may be found in the compilation by Okamuro and Goldberg (1989) Biochemistry of Plants 15:1-82.

[0072] The term “translation leader sequence” refers to a polynucleotide sequence located between the promoter sequence of a gene and the coding sequence. The translation leader sequence is present in the fully processed mRNA upstream of the translation start sequence.

[0073] The translation leader sequence may affect processing of the primary transcript to mRNA, mRNA stability or translation efficiency. Examples of translation leader sequences have been described (Turner and Foster (1995) Mol Biotechnol 3:225-236).

[0074] The terms “3′ non-coding sequences”, “transcription terminator” or “termination sequences” refer to DNA sequences located downstream of a coding sequence and include polyadenylation recognition sequences and other sequences encoding regulatory signals capable of affecting mRNA processing or gene expression. The polyadenylation signal is usually characterized by affecting the addition of polyadenylic acid tracts to the 3′ end of the mRNA precursor. The use of different 3′ non-coding sequences is exemplified by Ingelbrecht et al. (1989) Plant Cell 1:671-680.

[0075] The term “RNA transcript” refers to the product resulting from RNA polymerase-catalyzed transcription of a DNA sequence. When the RNA transcript is a perfect complementary copy of the DNA sequence, it is referred to as the primary transcript. A RNA transcript is referred to as the mature RNA when it is a RNA sequence derived from post-transcriptional processing of the primary transcript. “Messenger RNA” or “mRNA” refers to the RNA that is without introns and that can be translated into protein by the cell. “cDNA” refers to a DNA that is complementary to, and synthesized from, a mRNA template using the enzyme reverse transcriptase. The cDNA can be single-stranded or converted into double-stranded form using the Klenow fragment of DNA polymerase I. “Sense” RNA refers to RNA transcript that includes the mRNA and can be translated into protein within a cell or in vitro. “Antisense RNA” refers to an RNA transcript that is complementary to all or part of a target primary transcript or mRNA, and that blocks the expression of a target gene (U.S. Pat. No. 5,107,065). The complementarity of an antisense RNA may be with any part of the specific gene transcript, i.e., at the 5′ non-coding sequence, 3′ non-coding sequence, introns, or the coding sequence. “Functional RNA” refers to antisense RNA, ribozyme RNA, or other RNA that may not be translated but yet has an effect on cellular processes. The terms “complement” and “reverse complement” are used interchangeably herein with respect to mRNA transcripts, and are meant to define the antisense RNA of the message.

[0076] The term “operably linked” refers to the association of nucleic acid sequences on a single nucleic acid fragment so that the function of one is regulated by the other. For example, a promoter is operably linked with a coding sequence when it is capable of regulating the expression of that coding sequence (i.e., the coding sequence is under the transcriptional control of the promoter). Coding sequences can be operably linked to regulatory sequences in a sense or antisense orientation. In another example, the complementary RNA regions of the invention can be operably linked, either directly or indirectly, 5′ to the target mRNA, or 3′ to the target mRNA, or within the target mRNA, or a first complementary region is 5′ and its complement is 3′ to the target mRNA.

[0077] Standard recombinant DNA and molecular cloning techniques used herein are well known in the art and are described more fully in Sambrook et al., Molecular Cloning: A Laboratory Manual; Cold Spring Harbor Laboratory: Cold Spring Harbor, N.Y. (1989). Transformation methods are well known to those skilled in the art and are described infra.

[0078] “PCR” or “polymerase chain reaction” is a technique for the synthesis of specific DNA segments and consists of a series of repetitive denaturation, annealing, and extension cycles. Typically, a double-stranded DNA is heat denatured, the two primers complementary to the 3′ boundaries of the target segment are annealed at low temperature, and then extended at an intermediate temperature. One set of these three consecutive steps is referred to as a “cycle”.

[0079] The term “recombinant” refers to an artificial combination of two otherwise separated segments of sequence, e.g., by chemical synthesis or by the manipulation of isolated segments of nucleic acids by genetic engineering techniques.

[0080] The terms “plasmid”, “vector” and “cassette” refer to an extra chromosomal element often carrying genes that are not part of the central metabolism of the cell, and usually in the form of circular double-stranded DNA fragments. Such elements may be autonomously replicating sequences, genome integrating sequences, phage or nucleotide sequences, linear or circular, of a single- or double-stranded DNA or RNA, derived from any source, in which a number of nucleotide sequences have been joined or recombined into a unique construction which is capable of introducing a promoter fragment and DNA sequence for a selected gene product along with appropriate 3′ untranslated sequence into a cell. “Transformation cassette” refers to a specific vector containing a foreign gene and having elements in addition to the foreign gene that facilitate transformation of a particular host cell. “Expression cassette” refers to a specific vector containing a foreign gene and having elements in addition to the foreign gene that allow for expression of that gene in a foreign host.

[0081] The terms “recombinant construct”, “expression construct”, “chimeric construct”, “construct”, and “recombinant DNA construct” are used interchangeably herein. A recombinant construct comprises an artificial combination of nucleic acid fragments, e.g., regulatory and coding sequences that are not found together in nature. For example, a chimeric construct may comprise regulatory sequences and coding sequences that are derived from different sources, or regulatory sequences and coding sequences derived from the same source, but arranged in a manner different than that found in nature. Such a construct may be used by itself or may be used in conjunction with a vector. If a vector is used, then the choice of vector is dependent upon the method that will be used to transform host cells as is well known to those skilled in the art. For example, a plasmid vector can be used. The skilled artisan is well aware of the genetic elements that must be present on the vector in order to successfully transform, select and propagate host cells comprising any of the isolated nucleic acid fragments of the invention. The skilled artisan will also recognize that different independent transformation events may result in different levels and patterns of expression (Jones et al. (1985) EMBO J. 4:2411-2418; De Almeida et al. (1989) Mol Gen Genet. 218:78-86), and thus that multiple events must be screened in order to obtain lines displaying the desired expression level and pattern. Such screening may be accomplished by Southern analysis of DNA, Northern analysis of mRNA expression, immunoblotting analysis of protein expression, or phenotypic analysis, among others.

[0082] The term “expression”, as used herein, refers to the production of a functional end-product (e.g., an mRNA or a protein, in either precursor or mature form).

[0083] The term “introduced” means providing a nucleic acid (e.g., expression construct) or protein into a cell. Introduced includes reference to the incorporation of a nucleic acid into a eukaryotic or prokaryotic cell where the nucleic acid may be incorporated into the genome of the cell, and includes reference to the transient provision of a nucleic acid or protein to the cell. Introduced includes reference to stable or transient transformation methods, as well as sexually crossing. Thus, “introduced” in the context of inserting a nucleic acid fragment (e.g., a recombinant DNA construct/expression construct) into a cell, means “transfection” or “transformation” or “transduction” and includes reference to the incorporation of a nucleic acid fragment into a eukaryotic or prokaryotic cell where the nucleic acid fragment may be incorporated into the genome of the cell (e.g., chromosome, plasmid, plastid or mitochondrial DNA), converted into an autonomous replicon, or transiently expressed (e.g., transfected mRNA).

[0084] The term “mature” protein refers to a post-translationally processed polypeptide (i.e., one from which any pre- or propeptides present in the primary translation product have been removed). “Precursor” protein refers to the primary product of translation of mRNA (i.e., with pre- and propeptides still present). Pre- and propeptides may be, but are not limited to, intracellular localization signals.

[0085] The term “stable transformation” refers to the transfer of a nucleic acid fragment into a genome of a host organism, including both nuclear and organellar genomes, resulting in genetically stable inheritance. In contrast, “transient transformation” refers to the transfer of a nucleic acid fragment into the nucleus, or DNA-containing organelle, of a host organism resulting in gene expression without integration or stable inheritance. Host organisms containing the transformed nucleic acid fragments are referred to as “transgenic” organisms.

[0086] The term “transgenic” refers to a plant or a cell, which comprises within its genome a heterologous polynucleotide. Preferably, the heterologous polynucleotide is stably integrated within the genome such that the polynucleotide is passed on to successive generations. The heterologous polynucleotide may be integrated into the genome alone or as part of an expression construct. Transgenic is used herein to include any cell, cell line, callus, tissue, plant part or plant, the genotype of which has been altered by the presence of heterologous nucleic acid including those transgenics initially so altered as well as those created by sexual crosses or asexual propagation from the initial transgenic. The term “transgenic” as used herein does not encompass the alteration of the genome (chromosomal or extra-chromosomal) by conventional plant breeding methods or by naturally occurring events such as random cross-fertilization, non-recombinant viral infection, non-recombinant bacterial transformation, non-recombinant transposition, or spontaneous mutation.

[0087] The term “plant” refers to whole plants, plant organs, plant tissues, seeds, plant cells, seeds and progeny of the same. Plant cells include, without limitation, cells from seeds, suspension cultures, embryos, meristematic regions, callus tissue, leaves, roots, shoots, gametophytes, sporophytes, pollen and microspores. Plant parts include differentiated and undifferentiated tissues including, but not limited to the following: roots, stems, shoots, leaves, pollen, seeds, tumor tissue and various forms of cells and culture (e.g., single cells, protoplasts, embryos and callus tissue). The plant tissue may be in plant or in a plant organ, tissue or cell culture. The term “plant organ” refers to plant tissue or a group of tissues that constitute a morphologically and functionally distinct part of a plant. The term “genome” refers to the following: (1) the entire complement of genetic material (genes and non-coding sequences) that is present in each cell of an organism, or virus or organelle; and/or (2) a complete set of chromosomes inherited as a (haploid) unit from one parent. “Progeny” comprises any subsequent generation of a plant.

[0088] The instant invention concerns an artificial plant minichromosome comprising a functional centromere containing: (a) at least two arrays of tandem repeats of CentC in an inverted orientation wherein the first array comprises at least fifty copies of CentC and the second array comprises at least fifty copies of CentC; and, (b) at least one copy of a retrotransposable element, wherein the retrotransposable element is situated between the first and the second array. Preferably, the retrotransposable element is selected from the group consisting of CentA, CRM1, and CRM2.

[0089] The artificial chromosome comprises a functional centromere having arrays of tandem repeats of CentC. Each array of CentC repeats may comprise at least 30, 40, 50, 60, 70, 80, 90, 100, 120, 140, 150, 160, 180, 200, 220, 240, 250, 260, 280, 300, 320, 340, 360, 380, 400, 450 or 500 copies of CentC. Further, each array of tandem repeats of CentC may be interrupted by another sequence element, including but not limited to a retrotransposon, which is inserted between copies of CentC, or within a CentC element, or within a retrotransposon, or any other sequence element in the array. Retrotransposons include, but are not limited to, CentA, CRM1, CRM2.

[0090] In most eukaryotes the centromere, which is the site for kinetochore formation and spindle attachment in chromosomes, is embedded in heterochromatin. S. cerevisiae chromosomes lack satellite sequences and have small, precisely localized centromeres which specify spindle attachment with ˜125 bp of DNA (Blackburn and Szostak (1984) Ann Rev Biochem 53:163-194).

[0091] However, centromeres from other fungal lineages include arrays of repeats more similar to those found animals and plants (Fishel et al. (1988) Mol Cell Biol 8:754-763). In higher eukaryotes, cytological and biochemical studies demonstrated a physical association between tandemly repeated satellite DNAs, centromere regions, and specific centromere associated proteins (Henikoff et al. (2001) Science 293:1098-1102; Yu and Dawe (2000) J Cell Biol 151:131-142).

[0092] Despite the lack of universal sequence motifs, most centromeric satellite repeats have remarkably similar unit length between organisms, for example the basic satellite unit is 171 bp in primates, 186 bp in the fish Sparus aurata, and 155 bp in the insect Chironomus pallidivittatus (Henikoff et al. (2001) Science 293:1098-1102).

[0093] Plant centromeres possess similar unit length repeats, for example, 156 bp repeat in maize (Ananiev et al. (1998) Proc Natl Acad Sci USA 95:13073-13078), 168 bp repeat in rice (Dong et al. (1998) Proc Natl Acad Sci USA 95:8135-8140), and 180 bp repeat in Arabidopsis (Copenhaver (2003) Chromosome Res 11:255-262). In Arabidopsis, centromeres typically contain 2.8-4 Mb tracts of tandemly repeated 178 bp satellite sequences (Hall et al. (2004) Curr Opin Plant Biol 7:108-114). In maize, a fully functional supernumerary B chromosome centromere contains about 500 kb of tandem repeats, wherein partial deletions reduce transmission (Alfenito and Birchler (1993) Genetics 135:589-597). Maize chromosome spreads containing the supernumerary B chromosome were hybridized with probes from various repetitive elements including CentC, CRM, and CentA, which localized to centromeric regions on the A chromosomes. These repetitive elements, predominantly found near A chromosome centromeres, hybridized to many sites distinct from the centromere on the B chromosome (Lamb et al. (2005) Chromosoma 113:337-349).

[0094] At least two examples deviate from the general rule of centromere formation on the basis of centromeric satellite DNA. First, the apparently normal functioning of alien centromeres in somatic hybrids or in oat-maize introgression lines (Ananiev et al. (1998) Proc Natl Acad Sci USA 95:13073-13078) is indicative of conservation of centromere function and corresponding protein complexes. All centromeric proteins to support the function of an alien centromere comprising unrelated centromeric satellite DNA are apparently provided by the host (Jin et al. (2004) Plant Cell 16:571-81). Second, neocentromeres are a novel class of non-repeat DNA-based centromeres recently described in humans and Drosophila (Williams (1998) Nat Genet. 18:30-37; Choo (1997) Am J Hum Genet. 61:1225-1233). Found as derivatives of normal chromosomes resulting from multiple chromosomal rearrangements, neocentromeres are formed at apparently euchromatic DNA regions devoid of the repeats typically associated with centromere function. Chromosomes with neocentromeres have variable mitotic or meiotic stability.

[0095] The nature and functioning of the centromere is not yet completely understood and requires additional analysis. To date, most artificial chromosomes have functional centromeres based on native centromeric satellite DNAs. It is possible that knob repeats, such as 180 bp and 350 bp (TRI), may be used as a component of a neocentromere. It was shown that some knobs could acquire centromere function in meiotic maize chromosomes, these neocentromeres comprised 180 bp and 350 bp tandem repeats only. The study of neocentromeres in humans and lower organisms, has unraveled a previously unsuspected phenomenon depicting the dynamic nature of centromeric DNA (Choo et al. (1997) Am J Hum Genet. 61:1225-33). At the core of this phenomenon, there appears to be no specific DNA sequence requirement for centromere function; rather, a variety of sequences that can respond to the appropriate epigenetic influence appear to provide this function.

[0096] Extensive characterizations of centromere sequences have come from studies in yeast, for example S. cerevisaie and S. pombe, and have defined functional yeast centromere elements and organization. For example, in S. cerevisaie centromeres the structure and function of three essential regions, CDEI, CDEII, and CDEIII, totaling only 125 bp, or 0.006-0.06% of each chromosome were described (Carbon et al. (1990) New Biologist 2:10-19; Bloom (1993) Cell 73:621-624).

[0097] S. pombe centromeres are between 40-100 kb and consist of repetitive elements that comprise 1-3% of each chromosome (Baum et al., (1994) Mol Cell Biol 5:747-761). Subsequent studies demonstrated that less than ⅓ of the native S. pombe centromere is sufficient for centromere function (Baum et al. (1994) Mol Cell Biol 5:747-761). In S. pombe, it was shown that an inverted repeat region was essential for centromeric function, but neither the central core nor one arm of the inverted repeat alone conferred function. Deletion of a portion of the repeated sequences that flank the central core had no effect on mitotic segregation functions, or on meiotic segregation of a minichromosome to haploid progeny, but drastically impaired centromere-mediated maintenance of sister chromatid pairing of homologues in meiosis 1. There is significant variability between each of the three different chromosomes in S. pombe, and the centromere of any particular chromosome can contain significant variability across different strains of S. pombe. However, the basic DNA structural motif, namely, the inverted repeats, is a common parameter of the S. pombe centromere (Clarke et al. (1993) Cold Spring Harb Symp Quant Biol 58:687-695).

[0098] Centromeres from higher eukaryotes are less characterized. DNA fragments that hybridize to centromeric regions in higher eukaryotes have been identified, however generally little is known about the structure, organization, and/or functionality of these sequences. However, rice is an exception because of its different centromere size. Though some rice chromosomes have a centromere similar in size to those in other species (>1 Mb), the centromeres of several chromosomes are surprisingly small and can be fully covered by BAC contigs constructed using standard techniques. Complete sequencing of rice centromere 4 and 8 revealed the presence of inverted blocks of centromeric tandem repeats within the chromosomal segment considered the centromere, similar to the inverted repeat structure observed in yeast (Zhang et al. (2004) Nucl Acids Res 32:2023-2030; Wu et al. (2004) Plant Cell 16:967-976).

[0099] In many cases probes to centromere repeats correlate with centromere location both cytologically and genetically, with many of these sequences present as tandemly-repeated satellite elements and dispersed repeated sequences in arrays ranging from 300-5000 kb in length (Willard (1990) Trends Genet. 6:410-416). In situ hybridization has shown the alphoid satellite 171 bp repeat to be present in each human centromere (Tyler-Smith et al. (1993) Curr Biol 390-397). Whether these repeats constitute functional centromeres is not yet determined, and it appears other genomic DNA is needed to confer heritability to the DNA. Transfection of cell lines with alphoid satellites produced new chromosomes, however these new chromosomes also contain host DNA, which could contribute to centromere activity (Haaf et al. (1992) Cell 70:681-696; Willard (1997) Nat Genet. 15:345-354). Further, the new chromosomes can show alphoid DNA spread over their entire length yet have only one centromeric constriction, indicating that a block of alphoid DNA may be insufficient to confer centromere function.

[0100] Genetic characterization of centromeres from plants has used segregation analysis of chromosome fragments, including analysis of trisomic strains carrying a genetically marked telocentric fragment (e.g., Koornneef (1983) Genetica 62:33-40). Plant centromere repetitive elements which are genetically (Richards et al. (1991) Nucl Acids Res 19:3351-3357) or physically (Alfenito et al. (1993) Genetics 135:589-597; Maluszynska et al. (1991) Plant J 1:159-166) linked to a centromere have been identified, however the importance of these sequences regarding centromere function has not been fully functionally characterized.

[0101] Cytological studies in Arabidopsis thaliana have correlated centromere structure with repeat sequences. Staining with a non-specific fluorescent DNA-binding agent, such as 4′,6-diamidino-2-phenylindole (DAPI), allows visualization of centromeric chromatin domains in metaphase chromosomes. A fluorescent in situ hybridization (FISH) probe to 180 bp pALI repeat sequences colocalized with the DAPI signature near the centromeres of all five Arabidopsis chromosomes (Maluszynska et al. (1991) Plant J 1:159-166; Martinez-Zapater et al., (1986) Mol Gen Genet. 204:417-423). A functional role for pALI was proposed, however more recent studies have not detected this sequence near the centromeres of species closely related to Arabidopsis (Maluszynska et al. (1993) Ann Botany 71:479-484). One species tested, A. pumila is believed to be an amphidiploid derived from a cross of A. thaliana with another close relative (Maluszynska et al. (1991) Plant J 1:159-166; Price et al. (1995) in Arabidopsis, Somerville and Meyerowitz (eds) Cold Spring Harbor Press, NY). Another repetitive sequence, pAt12, genetically maps to within 5 cM of the centromere of chromosome 1, and the central region of chromosome 5 (Richards et al. (1991) Nucl Acids Res 19:3351-3357), but its role in centromere function remains to be established.

[0102] Plant centromere regions are composed predominantly of centromere-specific repeats, centromeric retrotransposons, and a few other repetitive elements which are mostly scattered along the plant genome. For example centromeric repeats such as CentO and CRR are known from rice. Four centromere repetitive elements have been described in maize: CentA, CentC, CRM1, and CRM2 (SEQ ID NOS: 1-4). In maize, the first tandem repeated centromere-specific element discovered was CentC (Ananiev et al. (1998) Proc Natl Acad Sci USA 95:13073-13078). CentC forms multiple tandem arrays of varying length, with some tandem arrays comprising up to one thousand copies of the CentC repeat. The CentC tandem repeat interacts with CENH3 protein in the centromeric nucleosome.

[0103] Maize centromere-specific element, CentA, appears to be a retrotransposon based on its structure and properties (Ananiev et al. (1998) Proc Natl Acad Sci USA 95:13073-13078; GenBank AF078917). Another highly conservative centromere-specific retrotransposon of maize, CRM2, was found in 2003 (Nagaki et al. (2003) Genetics 163:759-770; GenBank AY129008). A fourth centromere-specific retrotransposon, CRM1 (SEQ ID NO: 3), was identified by comparative analysis of published DNA sequences of two maize centromeric BAC clones (Nagaki et al. (2003) Genetics 163:759-770) and proprietary maize genomic DNA sequences (Ananiev (2005) unpublished). Some homology can be detected among the centromeric repeat elements from closely related species, such as sorghum and sugarcane (Miller et al. (1998) Genetics 150:1615-1623; Nagaki et al. (1998) Chromosome Res 6:295-302; Zwick et al. (2000) Am J Bot 87:1757-1764); and maize and rice (Ananiev et al. (1998) Proc Natl Acad Sci USA 95:13073-13078); Cheng et al. (2002) Plant Cell 14:1691-1704).

[0104] In addition, plant centromeres contain abundant retrotransposons (CR), in cereals many of the CR elements fall within a highly conserved phylogenetic clade of Ty3/gypsy elements (Miller et al. (1998) Theor Appl Genet. 96:832-839; Presting et al. (1998) Plant J 16:721-728; Langdon et al. (2000) Genetics 156:313-325). The DNA homology is sufficient that CR probes from sorghum or Brachypodium sylvaticum identify the centromeres in most or all of the chromosomes in agronomically significant cereals such as rice, maize, wheat, sorghum, barley, and rye (Aragon-Alcaide et al. (1996) Chromosoma 105:261-268; Jiang et al. (1996) Proc Natl Acad Sci USA 93:14210-14213; Miller et al. (1998) Theor Appl Genet. 96:832-839).

[0105] Retrotransposons, also known as class I transposable elements, consist of two subtypes, the long terminal repeat (LTR) and the non-LTR retrotransposons. The long terminal repeat subtypes have direct LTRs that range from ˜100 bp to over 5 kb in size. LTR retrotransposons are further classified into the Ty1-copia-like (Pseudoviridae) and the Ty3-gypsy-like (Metaviridae) groups based on both their degree of sequence similarity and the order of encoded gene products. Ty1-copia and Ty3-gypsy groups of retrotransposons are commonly found in high copy number (up to a few million copies per haploid nucleus) in plants with large genomes. Ty1-copia retrotransposons are abundant in species ranging from single-cell algae to bryophytes, gymnosperms, and angiosperms. Ty3-gypsy retrotransposons are also widely distributed, including both gymnosperms and angiosperms. LTR retrotransposons make up approximately 8% of the human genome. Non-LTR retrotransposons consist of two subtypes, long interspersed nuclear elements (LINEs) and short interspersed nuclear elements (SINEs). They also can be found in high copy numbers (up to 250,000) in plant species. Plant transposons, including retrotransposons, are reviewed by Feschotte et al. (2002) Nat Rev Genet. 3:329-341. Plant retrotransposons are reviewed by Kumar and Bennetzen (1999) Ann Rev Genet. 33:479-532.

[0106] Centromeric retrotransposons are identifiable based on unified classification of reverse-transcribing elements used for phylogeny and taxonomy studies. Complete retroelements and retroviruses include two or more open reading frames (ORFs) that encode single proteins or polyproteins. The order of the genes in the elements varies, but are classified on the basis of amino acid alignments and key conserved residues or domains within the reverse transcriptase (RT), RNase H 15 (RH), integrase (INT) and aspartic protease (PR) genes and in a conserved cysteine-histidine (CH) zinc-finger-like domain. The retroelements also comprise long-terminal repeat (LTR) sequences that flank the internal region of the retroelement. Every family of retrotransposons has different, non-cross-hybridizing LTRs, and components within a family can vary (0-50%) in their LTR sequences. In the transposition process, the two LTRs are usually identical at the time of insertion, but as time passes substitutions can cause sequence divergence. Many retroelements are known, including centromere-specific retrotransposons (see, for example, SanMiguel et al. (1998) Nat Genet. 20:43-45; Turcotte et al. (2001) Plant J 25:169-179; Feng et al. (2002) Nature 420:316; Nagaki et al. (2004) Nat Genet. 36:138; Nagaki et al. (2003) Genetics 163:750-770: Wu et al. (2004) Plant Cell 16:967-976; Hansen and Haslop-Harrison (2004) Adv Bot Res 41:165-193).

[0107] There exists significant variation between centromeres of different maize chromosomes with respect to their relative size and the repeat composition. In maize CentC clusters can be as small as about 100 kb, or more than about 2000 kb in different chromosomes, but commonly in the range of about 200 kb to about 300 kb. Given the lower size range, it is possible that an entire central portion of maize centromere region could be found within a single BAC clone. The observed structural polymorphism suggests that a maize centromere is composed of redundant functional blocks, each of which may be capable of supporting centromere function. A significant (at least 10 fold) variation in centromere sizes as defined by the length and/or copy number of the CentC centromeric tandem repeats is observed among different maize chromosomes. There is also a significant variation in centromere size between homologous chromosomes from different inbreds.

[0108] In another aspect, the artificial plant minichromosome of the invention can comprise at least one functional telomere.

[0109] Telomeres are nucleoprotein caps at the ends of linear eukaryotic chromosomes essential for chromosomal end maintenance. Telomere DNA synthesis is done by telomerase, a ribonucleoprotein with reverse transcriptase activity (McKnight et al. (2002) Plant Mol Biol 48:331-337). Telomerase adds telomeric DNA onto the 3′ ends of chromosomes by copying a short template sequence within its RNA subunit. The telomeres of most organisms consist of highly conserved short asymmetric repeated sequences.

[0110] Many telomeric repeat sequences are known, including CCCCAA (C₄A₂, Tetrahymena & Paramecium); C₄A₄ (Oxytricha & Euplotes); C₃TA (Trypanosoma, Leishmania, & Physarum); C₁₋₃A (Saccharomyces); C₁₋₈T (Dictyostelium); and C₃TA₃ (Arabidopsis, human, mouse, Caenrhabditis). The number of repeats observed in native chromosomes varies widely between organisms, e.g., some ciliates have about 50 repeats, less than 350 repeats has been observed in Arabidopsis, and repeats totaling about 300-500 bp observed in Saccharomyces.

[0111] Telomere length in plants, which typically ranges from about 2-75 kb, is controlled by genetic and developmental factors. Telomeric regions have been isolated from Arabidopsis, and show tandem repeats heterogeneous in size (Richards and Ausubel, (1988) Cell 53:127-136). A 25-fold difference in the lengths of telomeres among inbred lines of maize was found, ranging from less than 2 kb for the WF9 line to about 40 kb for the CM37 line (Burr et al. (1992) Plant Cell 4:953-960). Closer toward the centromere, the canonical telomere repeat is often found mixed with other repetitive elements of the plant genome. In contrast, Drosophila uses transposons at the ends its chromosomes. The transposons, HeT-A and TART elements, are found in multiple copies at the end of each chromosome. Gradual shortening of the telomeres can be reversed by transposition of new transposon repeats to the ends. Similar to telomere maintenance by telomerase, the model for transposition in Drosophila invokes a mechanism using an RNA transposition intermediate which is converted into end DNA by reverse transcriptase.

[0112] DNA replication is the process by which cells make one complete copy of their genetic information before cell division. In E. coli, mammalian viruses, and S. cerevisiae, initiation of DNA replication is controlled by transacting initiator proteins that interact with cis-acting DNA replicator sequences. For S. cerevisiae, replicators encompass 100-200 bp and include the major replication origin sites where DNA synthesis begins. These replicators contain a conserved 11 bp autonomous replicating sequence (ARS) that binds the origin recognition complex (ORC) to nucleate formation of prereplication complexes (Gilbert (2001) Science 294:96-100).

[0113] In higher eukaryotes DNA replication can be initiated simultaneously in hundreds or thousands of chromosomal sites. Defined origin sequences are not required, many potential replication origins exist consisting of broad zones of closely spaced initiation sites, some of which may be used more frequently.

[0114] However, several specific eukaryotic origins of replication are known such as the origin of replication for 18S-26S rDNA which is located in a non-transcribed spacer (Ivessa and Zakian (2002) Genes Dev 16:2459-2464). This region is capable of promoting amplification of transgenic constructs (Hemann et al. (1994) DNA Cell Biol 13:437-445). Another specific origin is found in the downstream region of the dihydrofolate reductase (DHFR) gene in Chinese hamster ovary (CHO) cells (Altman and Fanning (2001) Mol Cell Biol 21:1098-1110). Preferential sites of replication initiation were also found in the Drosophila chromosome segment containing chorion genes (Levine and Spradling (1985) Chromosoma 92:136-142).

[0115] The replication machinery of plant and animal cells is likely capable of replicating any type of introgressed DNA, including integrated constructs, episomes, entire chromosomes, or their fragments (Gilbert (2001) Science 294:96-100).

[0116] Artificial minichromosomes are linear or circular DNA molecules constructed from cis-acting DNA sequence elements responsible for proper replication and partitioning of chromosomes to daughter cells. The cis-acting elements include: origins of replication (ori), the sites for initiation of DNA replication, also known as autonomous replication sequences (ARS); centromeres, the sites of kinetochore assembly for proper segregation of replicated chromosomes at mitosis and meiosis; and telomeres, specialized DNA repeat structures that stabilize the ends of linear chromosomes and facilitate complete replication of the chromosome ends.

[0117] Several strategies to produce eukaryotic minichromosomes are available, including but not limited to in vivo self-assembly of a minichromosome from component elements by the endogenous cellular chromosome maintenance machinery in the eukaryotic cell, assembly of a eukaryotic minichromosome from component elements in a prokaryotic cell, and in vitro assembly of a eukaryotic minichromosome from component elements.

[0118] Artificial minichromosomes were first constructed in Saccharomyces cerevisiae (Murray et al. (1986) Mol Cell Biol 6:3166-3172; Blackburn and Szostak (1984) Ann Rev Biochem 53:163-194). A circular plasmid comprising the yeast 125 bp centromere, an origin of replication, a selectable marker, and a palindromic arrangement of two stretches of telomeric DNA was assembled by conventional recombinant DNA techniques and introduced into yeast by spheroplast transformation where it resolved into a simple linear molecule. Linear constructs 50 kb in length containing a centromere, an origin of replication, and two telomeres replicated and segregated at mitosis with ˜99% accuracy, and retained in dividing cultures for at least 20 generations. The generation of YACs indicated the potential to assemble artificial chromosomes in other eukaryotes such as plants and animals. Experiments on YACs indicated that three cis-acting DNA sequences are needed to build an artificial chromosome: telomeres; origin(s) of replication; and a centromere.

[0119] Animal artificial chromosomes have been generated by two different approaches: generating de novo chromosomes from cloned DNA segments; or by fragmenting and rearranging a natural chromosome (Brown et al. (2000) Trends Biotechnol 18:402-403; Cooke (2001) Cloning Stem Cells 3:243-249; Lipps et al. (2003) Gene 304:23-33). The de novo approach, referred to as the assembly or bottom-up approach, generates artificial chromosomes by combining essential cloned components. Co-transfection of a mixture of human alphoid DNA, telomeres, human genomic DNA, and a selectable marker into HT1080 cells resulted in formation of minichromosomes (Harrington et al. (1997) Nat Genet. 15:345-355).

[0120] Characterization of the minichromosomes revealed that they all had complex cytogenetic structures, and were stably maintained in the absence of any selection. It was concluded that the minichromosomes and their centromere(s) were formed de novo from input DNA via complex rearrangements. Subsequently, other groups also used HT1080 cells to introduce linear or circular DNA constructs containing human alphoid DNA and telomeres cloned in YACs, PACs, or BACs (Compton et al. (1999) Nucl Acids Res 27:1762-1765; Grimes et al. (2001) EMBO Rep 2:910-914). Minichromosomes were observed with different frequencies and showed different mitotic stability. All minichromosomes produced were significantly bigger than the original constructs, varying from 5 to 10 Mb. Therefore, a fully functioning mammalian chromosome could be generated starting with cloned DNA serving as a backbone for de novo assembly.

[0121] Fragmentation and rearrangement of natural chromosomes retaining centromere and telomeric regions is another strategy for minichromosome production. Small chromosome fragments can be isolated by pulse field gel electrophoresis, retrofitted with desirable genes, and reintroduced into the host cell. Fragmented minichromosomes were observed in cancer cells, and other cell types after irradiation, however the fragments were too big for isolation and there was no way to control the gene composition.

[0122] One approach to control reduction of chromosome size was based on telomere associated chromosome fragmentation (TACF) or telomere directed truncation (TDT) (Heller et al. (1996) Proc Natl Acad Sci USA 93:7125-7130; Shen et al. (1997) Hum Mol Genet. 6:1375-1382). It involves successive fragmentation of specific human host chromosomes into smaller minichromosomes using a targeting vector encompassing a terminal telomere segment, a selectable marker, and sometimes a region of homology to the target chromosome. The resulting ‘engineered minichromosomes’ remain autonomous and segregate normally. Minichromosomes as small as 0.5 Mb have been generated containing alphoid DNA as the functional centromere sequence in human, hamster-human somatic cell hybrid lines, or chicken cells.

[0123] Recently, human artificial chromosomes were used to create transchromosomic-cloned calves producing human immunoglobulin. A human minichromosome (HAC) vector constructed by Cre/loxP mediated chromosome translocations and telomere-directed chromosome truncations in homologous recombination-proficient chicken DT40 cells was introduced into bovine primary fetal fibroblasts by microcell-mediated chromosome transfer (MMCT). Isolated nuclei from fetal fibroblasts with HAC were transferred into enucleated mature oocytes to produce cloned calves (Kuroiwa et al. (2002) Nat Biotechnol 20:889-894). An in vivo approach for generation of artificial chromosomes has been developed, based on the induction of intrinsic, large-scale amplification mechanisms of mammalian cells. Targeted integration of centromeric satellite DNA and the non-transcribed spacer of the rDNA on a specific chromosome resulted in large-scale amplification of centromeric regions. These amplified chromosomes become unstable and undergo significant rearrangements producing stable minichromosomes preferentially composed of satellite DNA (Kereso et al. (1996) Chromosome Res 4:226-239; Hadlaczky (2001) Curr Opin Mol Ther 3:125-132).

[0124] An artificial chromosome containing multiple sequence-specific recombination acceptor sites was developed (ACE platform). Sequences of interest are provided in a targeting vector, and lambda integrase enzyme used to catalyze recombination between the ACE platform and targeting vector.

[0125] Similar processes have been observed in plants. Spontaneous fragmentation of native chromosomes in plants has been observed. Minichromosomes were discovered in Arabidopsis (Murata et al. (2006) Chromosoma, published online Apr. 11, 2006), and maize (Brock and Pryor (1996) Chromosoma 104:575-584; Kato et al. (2005) Cytogenet Genome Res 109:156-165). In some instances, minichromosomes were induced by ionizing radiation (Riera-Lizarazu et al. (2000) Genetics 156:327-339).

[0126] A physical map of rice centromere 5 has been constructed, and could be used to create a rice artificial chromosome (Nonomura and Kurata, (2001) Chromosoma 110:284-291). A similar approach was proposed for the construction of an artificial chromosome for beet, Beta procumbens (Gindullis et al. (2001) Genome 44:846-855). Transgenic construct concatemerization, ligations, and rearrangements can be found in plant transformation events. General plant transformation with standard constructs can produce complex rearrangements, concatamerization, and construct amplification (Svitashev and Somers (2001) Genome 44:691-697; Svitashev et al. (2002) Plant J 32:443-445). Co-transformation of plants with multiple plasmids can produce transgenic loci containing combinations of the different transgenes (Wu et al. (2002) Transgenic Res 11:533-541). Similar to studies in animal cells, de novo assembly of artificial minichromosomes via spontaneous concatemerization and ligation of components can occur in plant cells (see, FIGS. 1-10, and 14-15).

[0127] The instant invention concerns an artificial plant minichromosome comprising a functional centromere, wherein the centromere specifically binds centromeric protein C.

[0128] Kinetochores link the centromeric DNA to the spindle fiber apparatus. Human autoantibodies that bind specifically near centromeres facilitated cloning of centromere-associated proteins (CENPs, Rattner (1991) Bioassays 13:51-56). At least one of these proteins belongs to the kinesin superfamily of microtubule motors (Yen (1991) EMBO J. 10:1245-1254). Yeast centromere-binding proteins have been identified through genetic and biochemical studies (Bloom (1993) Cell 73:621-624; Lechner et al. (1991) Cell 64:717-725). CENH3 is a highly conserved protein that replaces histone H3 in centromeres, is thought to recruit other proteins required for chromosome movement. CENH3 is present throughout the cell cycle and colocalizes with the kinetochore centromeric protein C (CENPC) in meiotic cells.

[0129] Antibodies specific to centromere-associated proteins can be used to confirm centromere assembly in a DNA construct and/or minichromosome. Immunolocalization of a CENP, such as CENH3 and/or CENPC, to the centromere of a minichromosome indicates formation of a functional centromere comprised of centromeric DNA elements and the associated binding proteins. Antiserum to maize centromeric histone H3 (CENH3, 17 kD) was made and tested on native maize chromosomes (Zhong et al. (2002) Plant Cell 14:2825-2836). Chromatin immunoprecipitation demonstrated that CentC and CRM2 interact specifically with CENH3. Approximately 38 and 33% of CentC and CRM2 were precipitated in the chromatin immunoprecipitation assay, confirming that much of CENH3 colocalizes with CentC. A maize homologue of mammalian CENPC was isolated by Dawe et al., ((1999) Plant Cell 11:1227-1238) and shown to be a component of the kinetochore in maize. A 20 amino acid conserved peptide from the amino terminal domain was used to produce antisera specific to maize CENPC, which was directly labeled and used to demonstrate that CENPC is specifically localized to the centromere of native and artificial minichromosomes in corn (see, e.g., FIGS. 3, 4, 8 and 10).

[0130] The centromeric repeat elements CentA, CentC, CRM1, and CRM2 include sequences that are substantially identical to the maize sequences for CentA, CentC, CRM1, and CRM2 of SEQ ID NOS:1-4. Substantially identical sequences include sequences that have a high homology to each other as exemplified by having significant percent sequence identity, and/or by selectively hybridizing under stringent conditions to a CentA, a CentC, a CRM1, or a CRM2 (SEQ ID NOS: 1-4), or a complement thereof. Sequences that selectively hybridize under stringent hybridization conditions include sequences that hybridize to the target sequence at least 2-fold over background and to the substantial exclusion of non-target nucleic acids. Selectively hybridizing sequences typically have about at least 80, 85, 90, 95, 96, 97, 98, 99 or 100% sequence identity to the target sequence. Any suitable hybridization conditions and buffers known in the art can be used, examples of which have been described herein. Sequence identity may be used to compare the primary structure of two polynucleotides or polypeptide sequences. Sequence identity measures the residues in the two sequences that are the same when aligned for maximum correspondence. Sequence relationships can be analyzed using computer-implemented algorithms. The sequence relationship between two or more polynucleotides, or two or more polypeptides can be determined by determining the best alignment of the sequences, and scoring the matches and the gaps in the alignment, which yields the percent sequence identity and the percent sequence similarity. Polynucleotide relationships can also be described based on a comparison of the polypeptides each encodes. Many programs and algorithms for comparison and analysis of sequences are known. Unless otherwise stated, sequence identity/similarity values provided herein refer to the value obtained using GAP Version 10 (GCG, Accelrys, San Diego, Calif.) using the following parameters: % identity and % similarity for a nucleotide sequence using GAP Weight of 50 and Length Weight of 3, and the nwsgapdna.cmp scoring matrix; % identity and % similarity for an amino acid sequence using GAP Weight of 8 and Length Weight of 2, and the BLOSUM62 scoring matrix (Henikoff and Henikoff (1992) Proc Natl Acad Sci USA 89:10915-10919). GAP uses the algorithm of Needleman & Wunsch (1970) J Mol Biol 48:443-453, to find the alignment of two complete sequences that maximizes the number of matches and minimizes the number of gaps. Substantially identical includes sequences having at least 80%, 85%, 90%, 91%, 92%, 93%, 94%, 95%, 96%, 97%, 98%, 99% or more sequence identity, wherein the sequences are expected to retain the native function based on the overall percent sequence identity, the sequence similarity, the overall alignment of primary sequence, the presence of conserved blocks of residues, the presence of conserved elements and/or domains, the presence of conserved functional domains, the presence of binding regions, the presence of catalytic residues, the predicted secondary and/or tertiary structure(s), the availability of known three-dimensional structures, and other criteria used by one of skill in the art to identify and predict a functional homologue of any particular sequence.

[0131] Variant polynucleotides include polynucleotides having at least one deletion, addition, and/or substitution in at least one of the 5′ end, 3′ end, and/or internal sites including introns or exons, as compared to the native polynucleotide. Variant polynucleotides include naturally occurring variants as well as synthetically derived polynucleotides, for example, those generated using site-directed mutagenesis. Conservative variants include sequences that maintain their function, encode the same polypeptide, or encode a variant polypeptide with substantially similar identity, function, and/or activity as the native polynucleotide. Variants can be identified with known techniques, for example, polymerase chain reaction (PCR), and/or hybridization techniques. Generally, variants of a particular polynucleotide will have at least about 40%, 45%, 50%, 55%, 60%, 65%, 70%, 75%, 80%, 85%, 90%, 91%, 92%, 93%, 94%, 95%, 96%, 97%, 98%, 99% or more sequence identity to that particular polynucleotide. Variant polynucleotides can also be evaluated by comparison of the percent sequence identity between the polypeptides encoded using standard alignment programs and parameters. When evaluated by comparison of the percent sequence identity shared by the two polypeptides each encodes, the percent sequence identity between the two encoded polypeptides is typically at least about 40%, 45%, 50%, 55%, 60%, 65%, 70%, 75%, 80%, 85%, 90%, 91%, 92%, 93%, 94%, 95%, 96%, 97%, 98%, 99% or more sequence identity.

[0132] Variant proteins include proteins having at least one deletion, addition, and/or substitution in at least one of the N-terminal end, C-terminal end, and/or an internal site, as compared to the native polypeptide. Variant proteins possess the desired biological activity of the protein. Variants include naturally occurring polypeptides, as well as those generated by human manipulation. Biologically active variants of a protein typically have at least about 40%, 45%, 50%, 55%, 60%, 65%, 70%, 75%, 80%, 85%, 90%, 91%, 92%, 93%, 94%, 95%, 96%, 97%, 98%, 99% or more sequence identity to the amino acid sequence for the native protein as determined by sequence alignment programs. A biologically active variant of a protein may differ from that protein by as few as 1-15 amino acid residues. Conservative substitutions generally refer to exchanging one amino acid with another having similar properties. For example, the model of Dayhoff et al. (1978) Atlas of Protein Sequence and Structure (Natl Biomed Res Found, Washington, D.C.) provides guidance on amino acid substitutions that are not expected to affect the biological activity of the protein.

[0133] Variant polynucleotides and proteins encompass sequences derived from mutagenic and/or recombinogenic procedures, such as mutagenesis and/or DNA shuffling. Methods for mutagenesis and nucleotide sequence alterations are known (see, e.g., Kunkel (1985) Proc Natl Acad Sci USA 82:488-492; Kunkel et al. (1987) Methods Enzymol 154:367-382; U.S. Pat. No. 4,873,192; Walker and Gaastra, eds. (1983) Techniques in Molecular Biology (MacMillan Publ. Co., NY) and the references cited therein). For example, one or more different recombinase coding sequences can be manipulated to create and select a new recombinase protein possessing the desired properties. Typically, libraries of recombinant polynucleotides are generated from a population of related sequences and can be homologously recombined in vitro or in vivo (see, e.g., Stemmer (1994) Proc Natl Acad Sci USA 91:10747-10751; Stemmer (1994) Nature 370:389-391; Crameri et al. (1997) Nat Biotechnol 15:436-438; Moore et al. (1997) J Mol Biol 272:336-347; Zhang et al. (1997) Proc Natl Acad Sci USA 94:4504-4509; Crameri et al. (1998) Nature 391:288-291; and U.S. Pat. Nos. 5,605,793, and 5,837,458). Generally, modifications in a polynucleotide encoding a polypeptide should not alter the reading frame, or create and/or alter DNA or mRNA secondary structure. See, EP Patent Application Publication Number 75,444.

[0134] Overlapping oligonucleotides, termed overgos, are primer pairs that span about 40 bp in length and are usually constituted from two 24-bp oligonucleotides that have an 8-bp overlapping region at the 3′ ends. This feature allows the overgo primer pair to prime on each other and synthesize their complementary strands with labeled nucleotides by the Klenow filling method (McPherson, (1999) Genome Analysis: A Laboratory Manual, 4:207-213, ed. Birren et al., Cold Spring Harbor Laboratory Press, Cold Spring Harbor, N.Y.). A variety of labeled nucleotides can be used, including but not limited to radioactive labeled nucleotides or fluorescent labeled nucleotides. This is useful for the generation of probes for different hybridization methods, including but not limited to colony hybridization, dot blots, Southern blots, and in situ hybridization, such as FISH. The major advantage of overgo probes over conventional probes for library hybridization is that the sequences for designing overgos can be selected, and thus repeated sequences present in a conventional DNA fragment probe can be avoided; therefore, the cross-hybridization problem that is frequently associated with large-genome DNA library screening can be minimized. Because of this advantage, overgo hybridization combined with the probe pooling strategy (Cai et al. (1998) Genomics 54:387-397; Chang et al. (2001) Genetics 159:1231-1242; Tao et al. (2001) Genetics 158:1711-1724; Romanov et al. (2003) Cytogenet Genome Res 101:277-281) has emerged as a method for high-throughput BAC library screening for clone identification and physical gene mapping.

[0135] In some examples genes or encoded polypeptides that can enhance or stimulate cell growth are provided with or within the DNA construct(s). Genes that enhance or stimulate cell growth include genes involved in transcriptional regulation, homeotic gene regulation, stem cell maintenance and proliferation, cell division, and/or cell differentiation such as WUS homologues (Mayer et al. (1998) Cell 95:805-815; WO01/0023575; US2004/0166563); aintegumenta (ANT) (Klucher et al. (1996) Plant Cell 8:137-153; Elliott et al. (1996) Plant Cell 8:155-168; GenBank Accession Numbers U40256, U41339, Z47554); clavata (e.g., CLV1, CVL2, CLV3) (WO03/093450; Clark et al. (1997) Cell 89:575-585; Jeong et al. (1999) Plant Cell 11:1925-1934; Fletcher et al. (1999) Science 283:1911-1914); Clavata and Embryo Surround region genes (e.g., CLE) (Sharma et al. (2003) Plant Mol Biol 51:415-425; Hobe et al. (2003) Dev Genes Evol 213:371-381; Cock and McCormick, (2001) Plant Physiol 126:939-942; Casamitjana-Martinez et al. (2003) Curr Biol 13:1435-1441); baby boom (e.g., BNM3, BBM, ODP1, ODP2) (WO00/75530; Boutileir et al. (2002) Plant Cell 14:1737-1749); Zwille (Lynn et al. (1999) Dev 126:469-481); leafy cotyledon (e.g., Lec1, Lec2) (Lotan et al. (1998) Cell 93:1195-1205; WO00/28058; Stone et al. (2001) Proc Natl Acad Sci USA 98:11806-11811; U.S. Pat. No. 6,492,577); Shoot Meristem-less (STM) (Long et al. (1996) Nature 379:66-69); ultrapetala (ULT) (Fletcher (2001) Dev 128:1323-1333); mitogen activated protein kinase (MAPK) (Jonak et al. (2002) Curr Opin Plant Biol 5:415); kinase associated protein phosphatase (KAPP) (Williams et al. (1997) Proc Natl Acad Sci USA 94:10467-10472; Trotochaud et al. (1999) Plant Cell 11:393-406); ROP GTPase (Wu et al. (2001) Plant Cell 13:2841-2856; Trotochaud et al. (1999) Plant Cell 11:393-406); fasciata (e.g., FAS1, FAS2) (Kaya et al. (2001) Cell 104:131-142); cell cycle genes (U.S. Pat. No. 6,518,487; WO99/61619; WO02/074909), Shepherd (SHD) (Ishiguro et al. (2002) EMBO J. 21:898-908); Poltergeist (Yu et al. (2000) Dev 127:1661-1670; Yu et al. (2003) Curr Biol 13:179-188); Pickle (PKL) (Ogas et al. (1999) Proc Natl Acad Sci USA 96:13839-13844); knox genes (e.g., KN1, KNAT1) (Jackson et al. (1994) Dev 120:405-413; Lincoln et al. (1994) Plant Cell 6:1859-1876; Venglat et al. (2002) Proc Natl Acad Sci USA 99:4730-4735); fertilization independent endosperm (FIE) (Ohad et al. (1999) Plant Cell 11:407-415), and the like. The combinations of polynucleotides include multiple copies of any one of the polynucleotides of interest, and the combinations may have any combination of up-regulating and down-regulating expression of the combined polynucleotides. The combinations may or may not be combined on one construct for transformation of the host cell, and therefore may be provided sequentially or simultaneously. The host cell may be a wild-type or mutant cell, in a normal or aneuploid state.

[0136] Site-specific recombinase systems can be used with any minichromosome system. Both integrases and recombinases capable of catalyzing both the forward and reverse reactions, are useful for introducing modifications after the DNA construct(s) or minichromosome has been established in the plant cell. Various intramolecular modifications, such as deletion or inversion of defined sequences can be done. Further, intermolecular insertions and exchanges can be done, including translocations with endogenous chromosomes comprising compatible site-specific recombination sites. The recombinase systems can also be used to establish target sites (docking sites) within the minichromosome for later site specific integration of polynucleotide(s) of interest provided by any method, including crossing or direct delivery.

[0137] Elements from recombination systems, such as recombinases, and recombination sites can be used, for example in a DNA construct, a target site, and/or a transfer cassette. A target site comprises a polynucleotide integrated into the genome, the polynucleotide comprising a promoter operably linked to at least one recombination site. A transfer cassette comprises at least a first recombination site operably linked to a polynucleotide of interest and/or a polynucleotide encoding a selection marker, wherein the first recombination site is recombinogenic with a recombination site in the target site. A targeted seed or plant has stably incorporated into its genome a DNA construct that has been generated and/or manipulated through the use of a recombination system. Site-specific recombination methods that result in various integration, alteration, and/or excision events to generate the recited DNA construct can be employed to generate a targeted seed. See, e.g., WO99/25821, WO99/25854, WO99/25840, WO99/25855, WO99/25853, WO99/23202, WO99/55851, WO01/07572, WO02/08409, and WO03/08045.

[0138] A recombinase is a polypeptide that catalyzes site-specific recombination between its compatible recombination sites, and includes naturally occurring recombinase sequences, variants, and/or fragments that retain activity. A recombination site is a nucleotide sequence that is specifically recognized by a recombinase enzyme, and encompasses naturally occurring recombination site sequences, variants, and/or fragments that retain activity. For reviews of site-specific recombinases, see, Sauer (1994) Curr Op Biotech 5:521-527; Sadowski (1993) FASEB 7:760-767; Groth and Calos, (2004) J Mol Biol 335:667-678; and Smith and Thorpe (2002) Mol Microbiol 44:299-307. Any recombination system, or combination of systems, can be used including but not limited to recombinases and recombination sites from the integrase and/or resolvase families, biologically active variants and fragments thereof, and/or any other naturally occurring or recombinantly produced enzyme or variant thereof that catalyzes conservative site-specific recombination between specified recombination sites, and naturally occurring or modified recombination sites or variants thereof that are specifically recognized by a recombinase to generate a recombination event.

[0139] The recombination sites employed can be corresponding sites or dissimilar sites. Corresponding recombination sites, or a set of corresponding recombination sites, are sites having an identical nucleotide sequence. A set of corresponding recombination sites, in the presence of the appropriate recombinase, will efficiently recombine with one another. Dissimilar recombination sites have a distinct sequence, comprising at least one nucleotide difference as compared to each other. The recombination sites within a set of dissimilar recombination sites can be either recombinogenic or non-recombinogenic with respect to one another. Each recombination site within the set of dissimilar sites is biologically active and can recombine with an identical site. Recombinogenic sites are capable of recombining with one another in the presence of the appropriate recombinase. Recombinogenic sites include those sites where the relative excision efficiency of recombination between the recombinogenic sites is above the detectable limit under standard conditions in an excision assay as compared to the wild type control, typically, greater than 2%, 5%, 10%, 20%, 50%, 100% or greater. Non-recombinogenic sites will not recombine with one another in the presence of the appropriate recombinase, or recombination between the sites is not detectable. Non-recombinogenic recombination sites include those sites that recombine with one another at a frequency lower than the detectable limit under standard conditions in an excision assay as compared to the wild type control, typically, lower than 2%, 1.5%, 1%, 0.75%, 0.5%, 0.25%, 0.1%, 0.075, 0.005%, 0.001%. Any suitable non-recombinogenic recombination sites may be utilized, including a FRT site or active variant thereof, a lox site or active variant thereof, an att site or active variant thereof, any combination thereof, or any other combination of non-recombinogenic recombination sites. Directly repeated recombination sites in a set of recombinogenic recombination sites are arranged in the same orientation, recombination between these sites results in excision of the intervening DNA sequence. Inverted recombination sites in a set of recombinogenic recombination sites are arranged in the opposite orientation, recombination between these sites results in inversion of the intervening DNA sequence.

[0140] The Integrase family of recombinases has over one hundred members and includes, for example, FLP, Cre, Dre, Int, and R. For other members of the Integrase family, see for example, Esposito et al. (1997) Nucl Acids Res 25:3605-3614; Nunes-Duby et al. (1998) Nucl Acids Res 26:391-406; Abremski et al. (1992) Protein Eng 5:87-91; Groth and Calos, (2004) J Mol Biol 335:667-678; and Smith and Thorpe, (2002) Mol Microbiol 44:299-307. Other recombination systems include, for example, streptomycete bacteriophage phiC31 (Kuhstoss et al. (1991) J Mol Biol 20:897-908); bacteriophage λ (Landy, (1989) Ann Rev Biochem 58:913-949, and Landy, (1993) Curr Op Genet Dev 3:699-707); SSV1 site-specific recombination system from Sulfolobus shibatae (Maskhelishvili et al. (1993) Mol Gen Genet. 237:334-342); and a retroviral integrase-based integration system (Tanaka et al. (1998) Gene 17:67-76). In some examples, the recombinase is one that does not require cofactors or a supercoiled substrate. Such recombinases include Cre, FLP, phiC31 Int, mutant λ Int, R, SSV1, Dre, or active variants or fragments thereof. FLP recombinase catalyzes a site-specific reaction between two FRT sites, and is involved in amplifying the copy number of the two-micron plasmid of S. cerevisiae during DNA replication. The FLP protein has been cloned and expressed. See, for example, Cox, (1993) Proc Natl Acad Sci USA 80:4223-4227. The FLP recombinase used may be derived from the genus Saccharomyces. In some examples a polynucleotide synthesized using plant-preferred codons encoding the recombinase is used. FLP enzyme encoded by a nucleotide sequence comprising maize preferred codons (FLPm) that catalyzes site-specific recombination events is known (U.S. Pat. No. 5,929,301). Additional functional variants and fragments of FLP are known. See, for example, Buchholz et al. (1998) Nat Biotechnol 16:617-618, Hartung et al. (1998) J Biol Chem 273:22884-22891, Saxena et al. (1997) Biochim Biophys Acta 1340:187-204, Hartley et al. (1980) Nature 286:860-864, Shaikh and Sadowski, (2000) J Mol Biol 302:27-48, Voziyanov et al. (2002) Nucl Acids Res 30:1656-1663, and Voziyanov et al. (2003) J Mol Biol 326:65-76. The bacteriophage P1 recombinase Cre catalyzes site-specific recombination between two lox sites. See, for example, Guo et al. (1997) Nature 389:40-46; Abremski et al. (1984) J Biol Chem 259:1509-1514; Chen et al. (1996) Somat Cell Mol Genet. 22:477-488; Shaikh et al. (1977) J Biol Chem 272:5695-5702; and, Buchholz et al. (1998) Nat Biotechnol 16:617-618. Cre polynucleotide sequences may also be synthesized using plant-preferred codons, for example, moCre (see, e.g., WO 99/25840), and other variants are known, see for example Vergunst et al. (2000) Science 290:979-982, Santoro and Schulz (2002) Proc Natl Acad Sci USA 99:4185-4190, Shaikh and Sadowski (2000) J Mol Biol 302:27-48, Rufer and Sauer (2002) Nucl Acids Res 30:2764-2771, Wierzbicki et al. (1987) Mol Biol 195:785-794, Petyuk et al. (2004) J Biol Chem 279:37040-37048, Hartung and Kisters-Wolke (1998) J Biol Chem 273:22884-22891, Koresawa et al. (2000) J Biochem (Tokyo) 127:367-372, U.S. Pat. No. 6,890,726, and Buchholz and Stewart (2001) Nat Biotechnol 19:1047-1052. A Cre homolog has been identified in P1-related phages, the recombinase isolated from phage D6 is known as Dre which is a tyrosine recombinase closely related to Cre, but which recognizes distinct 32 bp rox sites (Sauer and McDermott (2004) Nucl Acids Res 32:1-10). The phiC31 integrase and variants are known (Kushtoss et al. (1991) J Mol Biol 222:897-908, WO03/066867, WO05/017170, US2005/0003540, and Sclimenti et al. (2001) Nucl Acids Res 29:5044-5051. The X integrase and cofactors (Hoess et al. (1980) Proc Natl Acad Sci USA 77:2482-2486, Blattner et al. (1997) Science 277:1453-1474), and variants thereof are known, including cofactor-independent Int variants (Miller et al. (1980) Cell 20:721-729, Lange-Gustafson and Nash (1984) J Biol Chem 259:12724-12732, Christ et al. (1998) J Mol Biol 288:825-836, and Lorbach et al. (2000) J Mol Biol 296:1175-1181), att site recognition variants (Dorgai et al. (1995) J Mol Biol 252:178-188, Yagu et al. (1995) J Mol Biol 252:163-167, and Dorgai et al. (1998) J Mol Biol 277:1059-1070), as well as maize codon optimized Int, variant, and cofactor sequences (WO03/08045). Other integrases and variants are known, such as HK022 integrase (Kolot et al. (1999) Mol Biol Rep 26:207-213) and variants such as att site recognition variants (Dorgai et al. (1995) J Mol Biol 252:178-188, Yagu et al. (1995) J Mol Biol 252:163-167, and Dorgai et al. (1998) J Mol Biol 277:1059-1070).

[0141] Wild-type recombination sites, mutant, or any combination of wild type and/or mutant sites can be used. Such recombination sites include, for example, wild type lox, FRT, and att sites, and mutant lox, FRT, and att sites. An analysis of the recombination activity of mutant lox sites is presented in Lee et al. (1998) Gene 216:55-65. Other recombination sites and variants are known, see for example, Hoess et al. (1982) Proc Natl Acad Sci USA 79:3398-3402; Hoess et al. (1986) Nucl Acids Res 14:2287-2300; Thomson et al. (2003) Genesis 36:162-167; Schlake and Bode (1994) Biochemistry 33:12746-12751; Siebler and Bode (1997) Biochemistry 36:1740-1747; Huang et al. (1991) Nucl Acids Res 19:443-448; Sadowski (1995) in Progress in Nucleic Acid Research and Molecular Biology 51:53-91; Cox (1989) in Mobile DNA, Berg and Howe (eds) American Society of Microbiology, Washington D.C., pp. 116-670; Dixon et al. (1995) Mol Microbiol 18:449-458; Umlauf and Cox (1988) EMBO J. 7:1845-1852; Buchholz et al. (1996) Nucl Acids Res 24:3118-3119; Kilby et al. (1993) Trends Genet. 9:413-421; Rossant and Geagy (1995) Nat Med 1:592-594; Bayley et al. (1992) Plant Mol Biol 18:353-361; Odell et al. (1990) Mol Gen Genet 223:369-378; Dale and Ow (1991) Proc Natl Acad Sci USA 88:10558-10562; Qui et al. (1994) Proc Natl Acad Sci USA 91:1706-1710; Stuurman et al. (1996) Plant Mol Biol 32:901-913; Dale et al. (1990) Gene 91:79-85; Albert et al. (1995) Plant J 7:649-659, U.S. Pat. No. 6,465,254, WO01/23545, WO99/55851, and WO01/11058. In some examples, sets of dissimilar and corresponding recombination sites can be used, for example sites from different recombination systems. Accordingly, any suitable recombination site or set of recombination sites may be used, including a FRT site, a biologically active variant of a FRT site, a lox site, a biologically active variant of a lox site, an att site, a biologically active variant of an att site, any combination thereof, or any other combination of recombination sites. Examples of FRT sites include, for example, the minimal wild type FRT site (FRT1), and various mutant FRT sites, including but not limited to FRT5, FRT6, and FRT7 (see, U.S. Pat. No. 6,187,994). Additional variant FRT sites are known, (see, e.g., WO01/23545, and US Patent Application Publication 2007/0015195, herein incorporated by reference). Other recombination sites that can be used include att sites, such as those disclosed in Landy (1989) Ann Rev Biochem 58:913-949, Landy (1993) Curr Op Genet Dev 3:699-707, U.S. Pat. No. 5,888,732, WO01/07572, and Thygarajan et al. (2001) Mol Cell Biol 21:3926-3934. The site-specific recombinase(s) used depend on the recombination sites in the target site and the transfer cassette. If FRT sites are utilized, FLP recombinase is provided, when lox sites are utilized, Cre recombinase is provided, when λ att sites are used, λ Int is provided, when phiC31 att sites are used, phiC31 Int is provided. If the recombination sites used comprise sites from different systems, for example a FRT and a lox site, both recombinase activities can be provided, either as separate entities, or as a chimeric recombinase, for example FLP/Cre (see, e.g., WO 99/25840).

[0142] A marker provides for the identification and/or selection of a cell, plant, and/or seed expressing the marker. Markers include, e.g., screenable, visual, and/or selectable marker. A selection marker is any marker, which when expressed at a sufficient level, confers resistance to a selective agent. For example visual markers can be used to identify transformed cells comprising the introduced DNA construct(s). In one example the visual marker is a fluorescent protein. Such fluorescent proteins include but are not limited to yellow fluorescent protein (YFP), green fluorescent protein (GFP), cyan fluorescent protein (CFP), and red fluorescent protein (RFP). In still other examples, the visual marker is encoded by a polynucleotide having maize preferred codons. In further examples, the visual marker comprises GFPm, AmCyan, ZsYellow, or DsRed. See, Wenck et al. (2003) Plant Cell Rep. 22:244-251.

[0143] Selection markers and their corresponding selective agents include, but are not limited to, herbicide resistance genes and herbicides; antibiotic resistance genes and antibiotics; and other chemical resistance genes with their corresponding chemical agents. Bacterial drug resistance genes include, but are not limited to, neomycin phosphotransferase II (nptII) which confers resistance to kanamycin, paromycin, neomycin, and G418, and hygromycin phosphotransferase (hph) which confers resistance to hygromycin B. See also, Bowen (1993) Markers for Plant Gene Transfer, Transgenic Plants, Vol. 1, Engineering and Utilization; Everett et al. (1987) Bio/Technology 5:1201-1204; Bidney et al. (1992) Plant Mol Biol 18:301-313; and WO97/05829.

[0144] Resistance may also be conferred to herbicides from several groups, including amino acid synthesis inhibitors, photosynthesis inhibitors, lipid inhibitors, growth regulators, cell membrane disrupters, pigment inhibitors, seedling growth inhibitors, including but not limited to imidazolinones, sulfonylureas, triazolopyrimidines, glyphosate, sethoxydim, fenoxaprop, glufosinate, phosphinothricin, triazines, bromoxynil, and the like. See, for example, Holt (1993) Ann Rev Plant Physiol Plant Mol Biol 44:203-229; and Miki et al. (2004) J Biotechnol 107:193-232. Selection markers include sequences that confer resistance to herbicides, including but not limited to, the bar gene, which encodes phosphinothricin acetyl transferase (PAT) which confers resistance to glufosinate (Thompson et al. (1987) EMBO J. 6:2519-2523); glyphosate oxidoreductase (GOX), glyphosate N-acetyltransferase (GAT), and 5-enol pyruvylshikimate-3-phosphate synthase (EPSPS) which confer resistance to glyphosate (Barry et al, (1992) in Biosynthesis and Molecular Regulation of Amino Acids in Plants, Singh et al. (Eds) pp. 139-145; Kishore et al. (1992) Weed Tech 6:626-634; Castle (2004) Science 304:1151-1154; Zhou et al. (1995) Plant Cell Rep 15:159-163; WO97/04103; WO02/36782; and WO03/092360). Other selection markers include dihydrofolate reductase (DHFR), which confers resistance to methotrexate (see, e.g., Dhir et al. (1994) Improvements of Cereal Quality by Genetic Engineering, Henry (ed), Plenum Press, New York; and Hauptmann et al. (1988) Plant Physiol 86:602-606). Acetohydroxy acid synthase (AHAS or ALS) mutant sequences lead to resistance to imidiazolinones and/or sulfonylureas such as imazethapyr and/or chlorsulfuron (see, e.g., Zu et al. (2000) Nat Biotechnol 18:555-558; U.S. Pat. Nos. 6,444,875 and 6,660,910; Sathasivan et al. (1991) Plant Physiol 97:1044-1050; Ott et al. (1996) J Mol Biol 263:359-368; and Fang et al. (1992) Plant Mol Biol 18:1185-1187).

[0145] In addition, chemical resistance genes further include tryptophan decarboxylase which confers resistance to 4-methyl tryptophan (4-mT) (Goodijn et al. (1993) Plant Mol Biol 22:907-912); and bromoxynil nitrilase which confers resistance to bromoxynil. The selection marker may comprise cyanamide hydratase (Cah), see, for example, Greiner et al. (1991) Proc Natl Acad Sci USA 88:4260-4264; and Weeks et al. (2000) Crop Sci 40:1749-1754. Cyanamide hydratase enzyme converts cyanamide into urea, thereby conferring resistance to cyanamide. Any form or derivative of cyanamide can be used as a selection agent including, but not limited to, calcium cyanamide (Perlka® (SKW, Trotberg Germany) and hydrogen cyanamide (Dormex® (SKW)). See also, U.S. Pat. Nos. 6,096,947 and 6,268,547. Variants of cyanamide hydratase polynucleotides and/or polypeptides will retain cyanamide hydratase activity. A biologically active variant of cyanamide hydratase will retain the ability to convert cyanamide to urea. Methods to assay for such activity include assaying for the resistance of plants expressing the cyanamide hydratase to cyanamide. Additional assays include the cyanamide hydratase colorimetric assay (see, e.g., Weeks et al. (2000) Crop Sci 40:1749-1754; and U.S. Pat. No. 6,268,547).

[0146] The present invention also concerns an isolated polynucleotide comprising: (a) at least two arrays of tandem repeats of CentC in an inverted orientation wherein the first array comprises at least ten copies of CentC and the second array comprises at least ten copies of CentC; and, (b) at least one copy of a retrotransposable element, wherein the retrotransposable element is situated between the first and the second array. Suitable retrotransposable elements are discussed above.

[0147] Also within the scope of the invention is an isolated polynucleotide comprising: (a) at least one array of tandem repeats of CentC, the array comprising at least ten copies of CentC; and, (b) at least one copy of a retrotransposable element selected from the group consisting of CentA, CRM1, and CRM2.

[0148] In still another aspect, the present invention concerns an isolated polynucleotide comprising: (a) at least one array of tandem repeats of CentC, the array comprising at least ten copies of CentC; and, (b) at least one copy each of CentA, CRM1, and CRM2.

[0149] The isolated polynucleotides comprise at least one array of tandem repeats of CentC. Each array of CentC repeats may comprise at least 5, 10, 15, 20, 25, 30, 40, 50, 60, 70, 80, 90, 100, 120, 140, 150, 160, 180, 200, 220, 240, 250, 260, 280 or 300 copies of CentC. Further, each array of tandem repeats of CentC may be interrupted by another sequence element, including but not limited to a retrotransposon, which is inserted between copies of CentC, or within a CentC element, or within a retrotransposon, or any other sequence element in the array. Retrotransposons include, but are not limited to, CentA, CRM1, and CRM2.

[0150] A polynucleotide includes any nucleic acid molecule, and comprises naturally occurring, synthetic, and/or modified ribonucleotides, deoxyribonucleotides, and combinations of ribonucleotides and deoxyribonucleotides. Polynucleotides encompass all forms of sequences including, but not limited to, single-stranded, double-stranded, linear, circular, branched, hairpins, stem-loop structures, and the like.

[0151] Also within the scope of the invention is a recombinant construct comprising any of the isolated polynucleotides of the invention. A recombinant DNA construct comprises a polynucleotide which when present in the genome of a plant is heterologous or foreign to that chromosomal location in the plant genome. In preparing the DNA construct, various fragments may be manipulated to provide the sequences in a proper orientation and/or in the proper reading frame. Adapters or linkers may be employed to join the fragments. Other manipulations may be used to provide convenient restriction sites, removal of superfluous DNA, or removal of restriction sites. For example, in vitro mutagenesis, primer repair, restriction, annealing, resubstitutions, transitions, transversions, or recombination systems may be used. Polynucleotides of interest refer to any nucleic acid molecule included in the DNA construct(s) for any purpose, including but not limited to untranslated regions, regulatory regions, transcription initiation regions, translation initiation regions, introns, exons, polynucleotides encoding an RNA, selection markers, screenable markers, phenotypic markers, polynucleotides encoding a recombinase, recombination sites, target sites, transfer cassettes, restriction sites, recognition sites, insulators, enhancers, spacer/stuffer sequences, origins of replication, telomeric sequence, operators, and the like, can be provided in a DNA construct(s). The construct can include 5′ and 3′ regulatory sequences operably linked to the appropriate sequences. The DNA construct(s) can include in the 5′ to 3′ direction of transcription at least one of the following, a transcriptional and translational initiation region, the polynucleotide, and a transcriptional and translational termination region functional in plants. Alternatively, the DNA construct(s) may lack at least one 5′ and/or 3′ regulatory element. For example, DNA construct(s) may be designed such that upon introduction into a cell and in the presence of the appropriate recombinase a recombination event at the target site operably links the 5′ and/or 3′ regulatory regions to the appropriate sequences of the DNA construct(s).

[0152] Regulatory elements can be used in a variety of ways depending on the polynucleotide element, recombination site, transfer cassette and/or target site employed. In some examples intervening sequences can be present between operably linked elements and not disrupt the functional linkage. For example, an operable linkage between a promoter and a polynucleotide of interest allows the promoter to initiate and mediate transcription of the polynucleotide of interest. In some examples a translational start site is operably linked to a recombination site. In some examples, a recombination site is within an intron.

[0153] A cassette may additionally contain at least one additional sequence to be introduced into the plant. Alternatively, additional sequence(s) can be provided separately. DNA constructs can be provided with a plurality of restriction sites or recombination sites for manipulation of the various components and elements. DNA constructs may additionally contain selectable marker genes.

[0154] A transcriptional initiation region may be native, analogous, foreign, or heterologous to the plant host or to the polynucleotide of interest, and may be a natural sequence, a modified sequence, or a synthetic sequence. A number of promoters can be used to express a coding sequence.

[0155] A variety of promoters useful in plants is reviewed in Potenza et al. (2004) In Vitro Cell Dev Biol Plant 40:1-22. In some examples, the promoter expressing the selection marker is active in the seed. Promoters active in the seed include constitutive promoters, for example, the core promoter of the Rsyn7 promoter and other constitutive promoters disclosed in WO99/43838 and U.S. Pat. No. 6,072,050; the core CaMV 35S promoter (Odell et al. (1985) Nature 313:810-812); the MVV (mirabilis mosaic virus) promoter (Dey and Maiti (1999) Plant Mol Biol 40:771-782); rice actin (McElroy et al. (1990) Plant Cell 2:163-171); ubiquitin (Christensen et al. (1989) Plant Mol Biol. 12:619-632, and Christensen et al. (1992) Plant Mol Biol 18:675-689); pEMU (Last et al. (1991) Theor Appl Genet. 81:581-588); MAS (Velten et al. (1984) EMBO J. 3:2723-2730); ALS promoter (U.S. Pat. No. 5,659,026), and the like. Other constitutive promoters include those disclosed in, e.g., U.S. Pat. Nos. 5,608,149; 5,608,144; 5,604,121; 5,569,597; 5,466,785; 5,399,680; 5,268,463; 5,608,142 and 6,177,611.

[0156] The promoter may be a tissue-preferred promoter, to target enhanced expression within a particular plant tissue. In some examples, a seed-preferred promoter is used to express the selection marker. Seed-preferred promoters include both seed-specific promoters, active during seed development, as well as seed-germinating promoters, active during seed germination. See, Thompson et al. (1989) BioEssays 10:108. Seed-preferred promoters include, but are not limited to, Cim1 (cytokinin-induced message); cZ19B1 (maize 19 kDa zein); milps (myo-inositol-1-phosphate synthase) (see, WO00/11177, and U.S. Pat. No. 6,225,529), bean β-phaseolin, napin, β-conglycinin, soybean lectin, cruciferin, maize 15 kDa zein, 22 kDa zein, 27 kDa zein, waxy, shrunken 1, shrunken 2, globulin 1, end1, and end2 (WO00/12733), and the like.

[0157] A chemical-regulated promoter can be used to modulate expression in the seed through the application of an exogenous chemical regulator. The promoter may be a chemical-inducible promoter, where application of the chemical induces gene expression, or a chemical-repressible promoter, where application of the chemical represses gene expression. Chemical-inducible promoters include, but are not limited to, the maize In2-2 promoter, activated by benzenesulfonamide herbicide safeners; the maize GST promoter, activated by hydrophobic electrophilic compounds (e.g., some pre-emergent herbicides); and the tobacco PR-1a promoter, activated by salicylic acid. Other chemical-regulated promoters of interest include steroid-responsive promoters (see, for example, the glucocorticoid-inducible promoter in Schena et al. (1991) Proc Natl Acad Sci USA 88:10421-10425 and McNellis et al. (1998) Plant J 14:247-257) and tetracycline-inducible and tetracycline-repressible promoters (see, e.g., Gatz et al. (1991) Mol Gen Genet 227:229-237, and U.S. Pat. Nos. 5,814,618 and 5,789,156).

[0158] The DNA construct(s) can comprise expression units. Expression units can have elements including, but not limited to, introns, enhancers, leaders insulators, spacers, regions encoding an RNA, marker genes, recombination sites, termination regions, sequences encoding recombinases, enhancers, linkers, recognition sites, etc. In addition, the DNA constructs can comprise transfer cassettes, target sites, or any portions or combinations thereof. The DNA construct(s) can be modified in a variety of ways including but limited to site-specific recombination/integration methods or transposon-based transpositions, to provide a number of variations in the DNA construct(s). Polynucleotide sequences may be modified for expression in the plant. See, e.g., Campbell and Gowri (1990) Plant Physiol 92:1-11. Methods for synthesizing plant-preferred genes include, e.g., U.S. Pat. Nos. 5,380,831, 5,436,391 and Murray et al. (1989) Nucl Acids Res 17:477-498.

[0159] Additional sequence modifications are known to enhance gene expression in a cellular host. These include elimination of sequences encoding spurious polyadenylation signals, exon-intron splice site signals, transposon-like repeats, and other such well-characterized sequences that may be deleterious to gene expression. The G-C content of the sequence may be adjusted to average levels for a given host, as calculated by reference to endogenous genes expressed in the host. The sequence may also be modified to avoid secondary mRNA structures. Cassettes may additionally contain 5′ leader sequences in the DNA cassette which may act to enhance translation. Translation leaders include, e.g., pimaizeavirus leaders such as EMCV leader (Elroy-Stein et al. (1989) Proc Natl Acad Sci USA 86:6126-6130); potyvirus leaders such as TEV leader (Gallie et al. (1995) Gene 165:233-238), MDMV leader (Kong et al. (1988) Arch Virol 143:1791-1799), and human immunoglobulin heavy-chain binding protein (BiP) (Macejak et al. (1991) Nature 353:9094); untranslated leader from the coat protein mRNA of alfalfa mosaic virus (AMV RNA 4) (Jobling et al. (1987) Nature 325:622-625); tobacco mosaic virus leader (TMV) (Gallie et al. (1989) in Molecular Biology of RNA, ed. Cech (Liss, N.Y.), pp. 237-256); and maize chlorotic mottle virus leader (MCMV) (Lommel et al. (1991) Virology 81:382-385). See also, Della-Cioppa et al. (1987) Plant Physiol 84:965-968. Other methods or sequences known to enhance translation can also be utilized, such as introns, and the like.

[0160] Sequences of interest include, e.g., zinc fingers, kinases, heat shock proteins, transcription factors, DNA repair, agronomic traits, insect resistance, disease resistance, herbicide resistance, sterility, oil, protein, starch, digestibility, kernel size, maturity, nutrient composition, levels or metabolism, and the like. Insect resistance genes may encode resistance to pests such as rootworm, cutworm, European Maize Borer, and the like. Such genes include, e.g., B. thuringiensis toxic protein genes (U.S. Pat. Nos. 5,366,892; 5,747,450; 5,736,514; 5,723,756; 5,593,881; Geiser et al. (1986) Gene 48:109) and the like. Disease resistance traits include detoxification genes, such as against fumonosin (U.S. Pat. No. 5,792,931); avirulence (avr) and disease resistance (R) genes (Jones et al. (1994) Science 266:789; Martin et al. (1993) Science 262:1432; Mindrinos et al. (1994) Cell 78:1089); and the like. Herbicide resistance traits include genes coding for resistance to herbicides including sulfonylurea-type herbicides (e.g., the S4 and/or Hra mutations in ALS), herbicides that act to inhibit action of glutamine synthase, such as phosphinothricin or basta (e.g., the bar gene), EPSPS (U.S. Pat. Nos. 6,867,293; 5,188,642 and 5,627,061), GOX (Zhou et al. (1995) Plant Cell Rep 15:159-163), and GAT (U.S. Pat. No. 6,395,485). Antibiotic resistance genes may also be used, such as the nptII gene which encodes resistance to the antibiotics kanamycin and geneticin. Sterility genes can also be used, for example as an alternative to detasseling, including male tissue-preferred genes and genes with male sterility phenotypes such as QM (e.g., U.S. Pat. No. 5,583,210), kinases, and those encoding compounds toxic to either male or female gametophytic development.

[0161] Reduction of the activity of specific genes, silencing and/or suppression may be desired. Many techniques for gene silencing are known, including but not limited to antisense technology (see, e.g., Sheehy et al. (1988) Proc Natl Acad Sci USA 85:8805-8809; and U.S. Pat. Nos. 5,107,065; 5,453,566 and 5,759,829); cosuppression (e.g., Taylor (1997) Plant Cell 9:1245; Jorgensen (1990) Trends Biotech 8:340-344; Flavell (1994) Proc Natl Acad Sci USA 91:3490-3496; Finnegan et al. (1994) Bio/Technology 12:883-888; and Neuhuber et al. (1994) Mol Gen Genet. 244:230-241); RNA interference (Napoli et al. (1990) Plant Cell 2:279-289; U.S. Pat. No. 5,034,323; Sharp (1999) Genes Dev 13:139-141; Zamore et al. (2000) Cell 101:25-33; Javier (2003) Nature 425:257-263; and Montgomery et al. (1998) Proc Natl Acad Sci USA 95:15502-15507), virus-induced gene silencing (Burton et al. (2000) Plant Cell 12:691-705; and Baulcombe (1999) Curr Op Plant Bio 2:109-113); target-RNA-specific ribozymes (Haseloff et al. (1988) Nature 334: 585-591); hairpin structures (Smith et al. (2000) Nature 407:319-320; WO99/53050; WO02/00904 and WO98/53083); ribozymes (Steinecke et al. (1992) EMBO J. 11:1525; U.S. Pat. No. 4,987,071; and Perriman et al. (1993) Antisense Res Dev 3:253); oligonucleotide mediated targeted modification (e.g., WO03/076574: and WO99/25853); Zn-finger targeted molecules (e.g., WO01/52620; WO03/048345 and WO00/42219); and other methods, or combinations of the above methods.

[0162] The termination region may be native with the transcriptional initiation region, may be native with the operably linked DNA sequence of interest, or may be derived from another source. Convenient termination regions are available from the Ti-plasmid of A. tumefaciens, such as the octopine synthase and nopaline synthase termination regions. See also, Guerineau et al. (1991) Mol Gen Genet. 262:141-144; Proudfoot (1991) Cell 64:671-674; Sanfacon et al. (1991) Genes Dev 5:141-149; Mogen et al. (1990) Plant Cell 2:1261-1272; Munroe et al. (1990) Gene 91:151-158; Ballas et al. (1989) Nucl Acids Res 17:7891-7903 and Joshi et al. (1987) Nucl Acids Res 15:9627-9639.

[0163] In still another aspect, the present invention concerns a method for making a transgenic corn plant comprising an artificial plant minichromosome having a functional centromere, the method comprising:

[0164] (a) contacting at least one corn plant cell with a mixture comprising a recombinant construct of the invention;

[0165] (b) identifying at least one corn plant cell from step (a) comprising an artificial plant minichromosome having a functional centromere; and

[0166] (c) regenerating a fertile corn plant from the corn plant cell of step (b) wherein said corn plant comprises an artificial plant minichromosome having a functional centromere.

[0167] The mixture can further comprise a polynucleotide encoding a polypeptide that stimulates cell growth. Examples of polypeptides that stimulate cell growth include, but are not limited to, a wuschel, a baby boom, a RepA, or a Lec1.

[0168] Any method for introducing a sequence into a plant can be used, as long as the polynucleotide or polypeptide gains access to the interior of at least one cell. Methods for introducing sequences into plants are known and include, but are not limited to, stable transformation, transient transformation, virus-mediated methods, and sexual breeding. Stably incorporated indicates that the introduced polynucleotide is integrated into a genome and is capable of being inherited by progeny. Transient transformation indicates that an introduced sequence does not integrate into a genome such that it is heritable by progeny from the host. The plants and seeds employed may have a DNA construct stably incorporated into their genome. Any protocol may be used to introduce the DNA construct, any component of site-specific recombination systems, a polypeptide, or any other polynucleotide of interest. Providing comprises any method that brings together any polypeptide and/or a polynucleotide with any other recited components. Any means can be used to bring together a target site, transfer cassette, and appropriate recombinase, including, for example, stable transformation, transient delivery, and sexual crossing (see, e.g., WO99/25884). In some examples, the recombinase may be provided in the form of the polypeptide or mRNA. A series of protocols may be used in order to bring together the various components. For instance, a cell can be provided with at least one of these components via a variety of methods including transient and stable transformation methods; co-introducing a recombinase DNA, mRNA or protein directly into the cell; employing an organism (e.g., a strain or line) that expresses the recombinase; or growing/culturing the cell or organism carrying a target site, crossing to an organism expressing an active recombinase protein, and selecting events in the progeny. A simple integration pattern is produced when the transfer cassette integrates predominantly at the target site. Any promoter, including constitutive, inducible, developmentally, temporal, and/or spatially regulated promoter, etc., that is capable of regulating expression in the organism may be used.

[0169] Transformation protocols as well as protocols for introducing polypeptides or polynucleotide sequences into plants may vary depending on the type of plant or plant cell targeted for transformation. Suitable methods of introducing polypeptides and polynucleotides into plant cells include microinjection (Crossway et al. (1986) Biotechniques 4:320-334, U.S. Pat. No. 6,300,543; and U.S. patent application Ser. Nos. 11/427,947 and 11/427,371 all of which are herein incorporated by reference), electroporation (Riggs et al. (1986) Proc Natl Acad Sci USA 83:5602-5606, Agrobacterium-mediated transformation (U.S. Pat. Nos. 5,563,055 and 5,981,840), direct gene transfer (Paszkowski et al. (1984) EMBO J. 3:2717-2722), and ballistic particle acceleration (U.S. Pat. Nos. 4,945,050; 5,879,918; 5,886,244 and 5,932,782; Tomes et al. (1995) in Plant Cell, Tissue, and Organ Culture: Fundamental Methods, ed. Gamborg & Phillips (Springer-Verlag, Berlin); McCabe et al. (1988) Biotechnology 6:923-926); and Lec1 transformation (WO00/28058). Also, see Weissinger et al. (1988) Ann Rev Genet. 22:421-477; Sanford et al. (1987) Particulate Science and Technology 5:27-37 (onion); Christou et al. (1988) Plant Physiol 87:671-674 (soybean); Finer and McMullen (1991) In Vitro Cell Dev Biol 27P:175-182 (soybean); Singh et al. (1998) Theor Appl Genet. 96:319-324 (soybean); Datta et al. (1990) Biotechnology 8:736-740 (rice); Klein et al. (1988) Proc Natl Acad Sci USA 85:4305-4309 (maize); Klein et al. (1988) Biotechnology 6:559-563 (maize); U.S. Pat. Nos. 5,240,855; 5,322,783 and, 5,324,646; Klein et al. (1988) Plant Physiol 91:440-444 (maize); Fromm et al. (1990) Biotechnology 8:833-839 (maize); Hooykaas-Van Slogteren et al. (1984) Nature 311:763-764; U.S. Pat. No. 5,736,369 (cereals); Bytebier et al. (1987) Proc Natl Acad Sci USA 84:5345-5349 (Liliaceae); De Wet et al. (1985) in The Experimental Manipulation of Ovule Tissues, ed. Chapman et al. (Longman, N.Y.), pp. 197-209 (pollen); Kaeppler et al. (1990) Plant Cell Rep 9:415-418, Kaeppler et al. (1992) Theor Appl Genet. 84:560-566 (whisker-mediated transformation); D'Halluin et al. (1992) Plant Cell 4:1495-1505 (electroporation); Li et al. (1993) Plant Cell Rep 12:250-255; Christou and Ford (1995) Ann Bot 75:407-413 (rice); Osjoda et al. (1996) Nat Biotechnol 14:745-750 (maize via A. tumefaciens); and Ch. 8, pp. 189-253 in Advances in Cellular and Molecular Biology of Plants, Vol. 5, Ed. Vasil, Kluwer Acad Publ (Dordrecht, The Netherlands) 1999.

[0170] Various compounds can be used in conjunction with any direct delivery methods for introducing into plant cells any polynucleotide, polypeptide, or combinations thereof, optionally containing other components. For example, microprojectiles for a particle gun method can be prepared by associating DNA construct(s) with the microprojectiles in the presence of a cationic lipid solution, liposome solution, cationic polymer, DNA binding protein, cationic protein, cationic peptide, cationic polyamino acid, or combination thereof. In some examples, microprojectiles for a particle gun method are prepared by associating DNA construct(s) with the microprojectiles in the presence of Tfx-10, Tfx-20, Tfx-50, Lipofectin, Lipofectamine, Cellfectin, Effectene, Cytofectin GSV, Perfect Lipids, DOTAP, DMRIE-C, FuGENE-6, Superfect, Polyfect, polyethyleneimine, chitosan, protamine Cl, DNA binding proteins, histone H1, histone CENH3, poly-L lysine, DMSA, and the like.

[0171] The polynucleotide may be introduced into plants by contacting plants with a virus, or viral nucleic acids. Generally, such methods involve incorporating a desired polynucleotide within a viral DNA or RNA molecule. The sequence may initially be synthesized in a viral polyprotein and later processed in vivo or in vitro to produce a desired protein. Useful promoters encompass promoters utilized for transcription by viral RNA polymerases. Methods for introducing polynucleotides into plants and expressing a protein encoded, involving viral DNA or RNA molecules, are known, see, e.g., U.S. Pat. Nos. 5,889,191; 5,889,190; 5,866,785; 5,589,367; 5,316,931; and Porta et al. (1996) Mol Biotech 5:209-221.

[0172] Various components, including those from a site-specific recombination system, can be provided to a plant using a variety of transient methods. Such transient transformation methods include, but are not limited to, the introduction of the recombinase or active fragment or variant thereof directly, introduction of the recombinase mRNA, or using a non-integrative method, or introducing low levels of DNA into the plant. Such methods include, for example, microinjection, particle bombardment, viral vector systems, and/or precipitation of the polynucleotide wherein transcription occurs from the particle-bound DNA without substantive release from the particle or integration into the genome, such methods generally use particles coated with polyethylimine, (see, e.g., Crossway et al. (1986) Mol Gen Genet. 202:179-185; Nomura et al. (1986) Plant Sci 44:53-58; Hepler et al. (1994) Proc Natl Acad Sci USA 91:2176-2180 and Hush et al. (1994) J Cell Sci 107:775-784).

[0173] The transformed cells may be regenerated into plants using standard protocols and media, see, e.g., McCormick et al. (1986) Plant Cell Rep 5:81-84. These plants may then be grown and self-pollinated, backcrossed, and/or outcrossed, and the resulting progeny having the desired characteristic identified. Two or more generations may be grown to ensure that the characteristic is stably maintained and inherited and then seeds harvested. In this manner transformed/transgenic seed having the recited DNA construct stably incorporated into their genome are provided. A plant and/or a seed having stably incorporated the DNA construct can be further characterized for expression, site-specific integration potential, agronomics, and copy number (see, e.g., U.S. Pat. No. 6,187,994).

[0174] Fragments and variants of recombination sites, recombinases, selection markers, and nucleotide sequences of interest can be used, and unless otherwise stated, indicate that the variant or fragment retains at least some of the activity/function of the original composition. In instances where the polynucleotide encodes a protein, a fragment of a polynucleotide may encode protein fragments that retain the biological activity of the full-length protein. Fragments of a polynucleotide may range from at least about 20 nucleotides, about 50 nucleotides, about 100 nucleotides, and up to the full-length polynucleotide. A fragment of a polynucleotide that encodes a biologically active portion of a protein typically encodes at least 15, 25, 30, 50, 100, 150, 200, 250, 300, 325, 350, 375, 400, 420 or 450 contiguous amino acids, or any integer in this range up to and including the total number of amino acids present in a full-length protein. A biologically active fragment of a polypeptide can be prepared by isolating a portion of one of the polynucleotides encoding the portion of the polypeptide of interest, expressing the protein fragment, and assessing the activity.

[0175] Alternatively, a biologically active fragment of a polypeptide can be produced by selectively chemical or proteolytic cleaving of the full-length polypeptide, and the activity measured. For example, polynucleotides that encode fragments of a recombinase polypeptide can comprise nucleotide sequence comprising at least 16, 20, 50, 75, 100, 150, 200, 250, 300, 350, 400, 450, 500, 550, 600, 650, 700, 800, 900, 1,000, 1,100, 1,200, 1,300 or 1,400 nucleotides, or any integer in this range up to and including the total number of nucleotides of a full-length polynucleotide. In addition, fragments of a recombination site retain the biological activity of the recombination site, undergoing a recombination event in the presence of the appropriate recombinase. Fragments of a recombination site may range from at least about 5, 10, 15, 20, 25, 30, 35, 40 nucleotides, up to the full-length of a recombination site. For example, a full-length FRT, lox, attB, and attP sites are known and range from about 50 nucleotides to about 250 nucleotides, and fully active minimal are known and range from about 20, 25, 30, 35, 40, 45 and 50 nucleotides.

[0176] Assays to measure the biological activity of recombination sites and recombinases are known (see, e.g., Senecoll et al. (1988) J Mol Biol 201:406-421; Voziyanov et al. (2002) Nucl Acids Res 30:7; U.S. Pat. No. 6,187,994; WO01/00158; Albert et al. (1995) Plant J 7:649-659; Hartang et al. (1998) J Biol Chem 273:22884-22891; Saxena et al. (1997) Biochim Biophys Acta 1340:187-204; and Hartley et al. (1980) Nature 280-860-864). Assays for recombinase activity generally measure the overall activity of the enzyme on DNA substrates containing recombination sites. For example, to assay for FLP activity, inversion of a DNA sequence in a circular plasmid containing two inverted FRT sites can be detected as a change in position of restriction enzyme sites (see, e.g., Vetter et al. (1983) Proc Natl Acad Sci USA 80:7284). Alternatively, excision of DNA from a linear molecule or intermolecular recombination frequency induced by the enzyme may be assayed (see, e.g., Babineau et al. (1985) J Biol Chem 260:12313; Meyer-Leon et al. (1987) Nucl Acids Res 15:6469; and Gronostajski et al. (1985) J Biol Chem 260:12328). Recombinase activity may also be measured by excision of a sequence flanked by recombinogenic FRT sites to activate an assayable marker gene.

### EXAMPLES

[0177] The present invention is further defined in the following Examples, in which parts and percentages are by weight and degrees are Celsius, unless otherwise stated. It should be understood that these Examples, while indicating preferred embodiments of the invention, are given by way of illustration only. From the above discussion and these Examples, one skilled in the art can ascertain the essential characteristics of this invention, and without departing from the spirit and scope thereof, can make various changes and modifications of the invention to adapt it to various usages and conditions. Thus, various modifications of the invention in addition to those shown and described herein will be apparent to those skilled in the art from the foregoing description. Such modifications are also intended to fall within the scope of the appended claims.

[0178] The meaning of abbreviations is as follows: “sec” means second(s), “min” means minute(s), “h” means hour(s), “d” means day(s), “μl” means microliter(s), “mL” means milliliter(s), “L” means liter(s), “μM” means micromolar, “mM” means millimolar, “M” means molar, “mmol” means millimole(s), “pmole” mean micromole(s), “g” means gram(s), “μg” means microgram(s), “ng” means nanogram(s), “U” means unit(s), “bp” means base pair(s) and “kB” means kilobase(s).

### Example 1

### Identification and Isolation of Centromeres from Maize

[0179] To evaluate the size, composition, and structural organization of individual centromeres, labeled probes specific to a CentC, CentA, CRM1, and/or CRM2, were used individually and/or in a cocktail for fluorescent in situ hybridization (FISH) on maize meiotic pachytene, metaphase, anaphase I chromosomes and to extended DNA molecules (fiber-FISH). These four probes were also used for screening genomic maize BAC libraries.

### A. In Situ Hybridization

[0180] Multi-color FISH to maize metaphase chromosomes reveals that these four centromeric repeats are centromere-specific and co-localized in centromeric regions on all chromosomes in somatic cells. FISH analysis showed that the retrotransposons CRM1, CRM2, and CentA, occupy approximately the same region in maize centromeres. There is significant variation in repeat composition and relative size of repeat regions between centromeres of different maize chromosomes.

[0181] FISH results showed that the CentA probe had the weakest hybridization signal; the CRM1 probe showed a gradient-like hybridization pattern with the strongest signal around the primary constriction of the metaphase chromosome, with the signal gradually fading at the periphery of the centromere regions, and the CRM2 probe showed the most clear and compact hybridization signal. The strength of the FISH signal of the CentC repeats was highly dependent on the CentC copy number, which is variable between centromeres of different maize chromosomes. In some centromeres CentC is tightly clustered, showing slight overlap with the other centromeric repeats, in other chromosomes CentC repeat distribution shows more overlap with all other repeats. FISH of meiotic anaphase I chromosomes in microsporocytes with all four centromeric repeats revealed that the centromeric region at this stage is highly extended and only a small segment of the entire centromere region is actually attached to the kinetochore. All four repeats co-localized at the microtubule attachment segment, suggesting that a native functional centromere region comprises of all four centromeric repeats. Fiber-FISH on the extended DNA molecules was used to further characterize the distribution and arrangement of centromeric repeats at a higher resolution.

[0182] Oat by maize crosses generated F1 embryos that retained one or more maize chromosomes (see, e.g., Riera-Lizarazu et al. (1996) Theor Appl Genet. 93:123-135; Ananiev et al. (1997) Proc Natl Acad Sci USA 94:3524-3529). These lines provide a means to study individual maize chromosomes without the background complexities of the other nine maize chromosomes. A number of oat-maize addition lines are available from Ron Phillips at University of Minnesota (St. Paul, Minn., USA), including Seneca 60, A188, and B73 oat-maize addition lines used herein.

[0183] DNA from oat-maize chromosome addition lines were used for analysis of centromeric regions from individual maize chromosomes. Multicolor fiber-FISH on oat-maize chromosome addition lines revealed megabase-long hybridization stretches of centromeric repeats unique for each chromosome (FIG. 11). In chromosomes 1, 7 and 8 all four repeats were interspersed along the entire centromeric region. In other chromosomes, CentC was present as relatively short stretches (about 300 kb) flanked by “loose” arrays of the other three centromeric repeats. The overall length of the centromeric regions varied greatly between different maize chromosomes as observed by FISH. CentC revealed significant polymorphism between centromeres of individual chromosomes in the abundance of this repeat, with a difference of as much as 10 fold observed within any given genotype. Chromosome 7 had the largest blocks of CentC tandem repeats in metaphase and pachytene chromosomes. Similarly the oat-maize addition line with maize chromosome 7 had the longest stretches of DNA fibers which hybridize to CentC probe. Conversely, the centromere of maize chromosome 4 had the smallest block of CentC repeats in metaphase chromosomes and the smallest tracts of CentC in oat-maize chromosome 4 addition lines, especially in maize line B73 chromosome 4. When analyzed by fiber-FISH the centromeric retrotransposons CentA, CRM1, and CRM2 showed a dotted-like pattern with large gaps between positive hybridization signals. When probes to these three retrotransposons were mixed together and used as one cocktail probe they revealed more contiguously labeled DNA fibers interspersed with blocks of CentC repeats. The flanks of contiguously labeled centromeric retrotransposons showed a dotted-like pattern along the DNA molecules indicated that centromeric retrotransposons were interspersed with other types of DNA sequences, including non-centromere specific elements. The centromeric retrotransposons can form loose arrays up to 1 Mb in centromeres of chromosomes with small blocks of CentC repeats, such as chromosome 4. The maize hybrid Zapalote chico has a supernumary B-chromosome. FISH of Zapalote chico meiotic chromosomes indicated that the functional centromere of the maize B-chromosome contains all four centromeric repeats, similar to that observed in all the A-chromosomes. However, clusters of CentC repeats can be found also in several non-centromeric sites on the long arm of the B-chromosome. Those sites are apparently free from other centromeric repeats.

[0184] The results of FISH on mitotic and meiotic chromosomes, and fiber FISH suggested that the functional native centromeric segment responsible for the formation of the kinetochore on a maize chromosome generally comprises arrays of CentC tandem repeats intermixed with three other centromeric repeats, CRM1, CRM2 and CentA (FIG. 12).

### B. BAC Libraries

[0185] BAC vectors allow the cloning of large fragments of genomic DNA, up to about 300 kb in size, which can be maintained in a bacterial host, typically E. coli. A wide variety of BAC libraries have been generated from plant and animal species and made publicly available, see, for example, the information at Clemson University Genome Institute (CUGI; see, website at genome.clemson.edu) and Children's Hospital Oakland Research Institute (CHOR1; see, website at chori.org). Maize genomic BAC libraries representing greater than 13× coverage using multiple enzymes for library construction from two diverse maize genotypes, B73 and Mo17, representing the Dent and Lancaster heterotic groups respectively, were screened for maize centromeric sequences.

i. Maize Mo17 Genomic BAC Library

[0186] The pIndigoBac536 (Shizuya, unpublished) and pBeloBAC11 (Kim et al. (1996) Genomics 34:213-218) BAC cloning vectors were developed from pBAC108L (Shizuya et al. (1992) Proc Natl Acad Sci USA 89:8794-8797). The pBAC108L is a mini-F factor based plasmid. The F factor codes for genes that regulate its own replication and copy number in the cell. Vector pBeloBAC11 was generated by introducing the LacZ gene to facilitate recombinant clone identification by blue or colorless (white) phenotypes. pBeloBAC11 has three unique cloning sites: BamHI, SphI, and HindIII, which are flanked by the T7 and SP6 promoters. The rare-cutter restriction sites NotI, EagI, XmaI, SmaI, BglI, and SfiI can be used to excise the insert from pBeloBAC11. In vector pIndigoBac536, an EcoRI site has been modified in the chloramphenicol (CMR) gene so that the EcoRI site in the cloning site can be used for library construction. The pBeloBAC11 and plndigoBac536 vectors have two selection markers, LacZ and CM^{R} for transformant selection.

[0187] A proprietary maize genomic BAC library from maize Mo17 public inbred line was constructed in pBeloBAC11 or pIndigoBac536 essentially as described in Kim et al. ((1996) Genomics 34:213-218) under contract with the Shizuya laboratory at the California Institute of Technology. Briefly, Mo17 genomic DNA was partially digested with HindIII or EcoRI restriction enzymes. The DNA fragments were size fractionated in agarose gel and cloned in pBeloBAC11 HindIII sites or pIndigoBac536 EcoRI sites. The average insert size was about 150 kb. The entire Mo17 genomic BAC library consists of 433 384-well plates or 166,272 total BAC clones. The first half of the library comprising 214 plates contains BAC clones with HindIII inserts, while the second half of the library comprising 219 plates, contains BAC clones with EcoRI inserts. The BAC clones are maintained in E. coli DH10B (BRL Life Technologies).

ii. Maize B73 Genomic BAC Libraries

[0188] Two public maize B73 genomic BAC libraries were obtained. Library ZMMBBb is available from Clemson University Genome Institute (CUGI, University of Georgia, Athens, Ga., USA). The ZMMBBb BAC library was created at CUGI by cloning HindIII partially digested maize B73 genomic DNA into the plndigoBac536 vector comprising a chloramphenicol (CMR) resistance gene. The ZMMBBb BAC library comprises 247,680 total BAC clones with an average insert size of about 137 kb, representing a 14× genomic coverage. The second B73 BAC library, CHORI-201 (ZMMBBc) created by Pieter de Jong's laboratory at Children's Hospital Oakland Research Institute (CHOR1), is available from the BACPAC Resource Center at CHORI. To construct this library, genomic DNA was isolated from maize B73 nuclei. The first segment of the library was constructed using DNA partially digested with a combination of EcoRI and EcoRI methylase, the second segment was constructed using MboI partially digested DNA. Size selected DNA was cloned into the pTARBAC2.1 vector (segment 1, plates 1-288) between the EcoRI sites and into the pTARBAC1.3 vector (segment 2, plates 289-576) between the BamHI sites. The ligation products were transformed into E. coli DH10B electrocompetent cells (BRL Life Technologies). The BAC clones for each library segment in each vector have been arrayed into 288 384-well microtiter dishes. Segment 1 comprises 106,637 individual BAC clones with an average insert size of 163 kb, representing a 6.9× genomic coverage. Segment 2 comprises 105,579 individual BAC clones with an average insert size of 167 kb, representing a 7.0× genomic coverage. The total ZMMBBc library comprises 212,216 individual BAC clones with an average insert size of 165 kb, representing a 13.9× genomic coverage.

### C. BAC Library Screening

[0189] Maize B73 and Mo17 BAC libraries were screened with four separate probes to centromeric sequences CentA, CentC, CRM1, and CRM2. The probes were designed as OVERGO oligonucleotides 40 bp long and were unique to each centromere element. By using appropriate labels, these probes can be used for colony, and blot hybridization, and FISH and fiber-FISH.

i. Overgo Probes

[0190] Overgo probes are typically designed as two short oligonucleotides which have an 8 bp complementary overlapping region. The short oligonucleotides are typically in the range of 23-28 bp, with 24 bp being most commonly used. After annealing, the oligonucleotides form dimers with 16 bp single-stranded DNA on both sides. The partially double-stranded probe is labeled by filling the recessed 3′ termini using polymerization activity of the Klenow enzyme in the presence of labeled nucleotides. The final overgo probe comprises a labeled double-stranded 40 bp probe. TABLE 1 lists primers and probes used for generating, screening, and characterization of BAC clones, DNA constructs, and maize minichromosome events.

TABLE 1

| SEQ | | | |
|---|---|---|---|
| ID | Biocode | Oligo Name | Sequence |
| 5 | | PCR- | AGGGTTTAGGGTTTAG |
| | | Telomere-F | GGTTTAGGGTTTAGGG |
| 6 | | PCR- | CCCTAAACCCTAAAC |
| | | Telomere-R | CCTAAACCCTAAACC |
| 7 | 65644 | CentC-OVG- | GGTTCCGGTGGC |
| | | 1-40f | AAAAACTCGTGC |
| 8 | 65645 | CentC-OVG- | TGTCGGTGCATA |
| | | 1-40r | CAAAGCACGAGT |
| 9 | 65646 | CentC-OVG- | GAATGGGTGACG |
| | | 51-90f | TGCGACAACGAA |
| 10 | 65647 | CentC-OVG- | GGTGGTTTCTCG |
| | | 51-90r | CAATTTCGTTGT |
| 11 | 65648 | CentC-OVG- | GTTTTGGACCTA |
| | | 101-140f | AAGTAGTGGATT |
| 12 | 104790 | CentC-OVG- | CACAACGAACAT |
| | | 101-140r | GCCCAATCCACT |
| 13 | 69509 | CRM1- | CTTGGTCTTGGA |
| | | LTR-OVG1f | CAGTACCTCACT |
| 14 | 69510 | CRM1- | CCCTTGCGATCC |
| | | LTR-OVG2f | GACTACGACGAG |
| 15 | 69511 | CRM1- | TCACGAAGATCG |
| | | LTR-OVG3f | TTTCCTGTGCGC |
| 16 | 69512 | CRM1- | CAGCGCAGATTA |
| | | LTR-OVG4f | GCGCGTGTTCGA |
| 17 | 69513 | CRM1- | CCAACCCTAGGT |
| | | LTR-OVG5f | CGTCCATTATGG |
| 18 | 69514 | CRM1- | TTCAATTCTCTT |
| | | LTR-OVG6f | GCACGGGCCCGA |
| 19 | 69515 | CRM1- | TCAGGTCTACTT |
| | | LTR-OVG1r | CATCAGTGAGGT |
| 20 | 69516 | CRM1- | TGGCGCCTCGGG |
| | | LTR-OVG2r | CTTGCTCGTCGT |
| 21 | 69517 | CRM1- | TGTTCGTTCTTC |
| | | LTR-OVG3r | GATTGCGCACAG |
| 22 | 69518 | CRM1- | TTAGCCTTAGCT |
| | | LTR-OVG4r | ACTCTCGAACAC |
| 23 | 69519 | CRM1- | CCAGCCCAATTG |
| | | LTR-OVG5r | CGGCCCATAATG |
| 24 | 69520 | CRM1- | CACCTGGGCCAG |
| | | LTR-OVG6r | TGACTCGGGCCC |
| 25 | 69521 | CRM2- | TGATGAAGACAT |
| | | LTR-OVG1f | CCACACTACTGA |
| 26 | 69522 | CRM2- | TTGAACATGCTG |
| | | LTR-OVG2f | GATTCGGACTGC |
| 27 | 69523 | CRM2- | CTGCCCATGGTG |
| | | LTR-OVG3f | CTGCGTCACCCT |
| 28 | 69524 | CRM2- | GCGCGTGCTAGT |
| | | LTR-OVG4f | TCAGCCGCCCGT |
| 29 | 69525 | CRM2- | GTATCGGTTGCT |
| | | LTR-OVG5f | AAGGCGCAGCGT |
| 30 | 69526 | CRM2- | TATTGGTATAGA |
| | | LTR-OVG1r | TGCATCAGTAGT |
| 31 | 69527 | CRM2- | AAGTTGGTGTTC |
| | | LTR-OVG2r | TTCTGCAGTCCG |
| 32 | 69528 | CRM2- | CCCATTGGGCCAA |
| | | LTR-OVG3r | AATAGGGTGACG |
| 33 | 69529 | CRM2- | TTCCGAAGACAA |
| | | LTR-OVG4r | GAAGACGGGCGG |
| 34 | 69530 | CRM2- | CTACAGCCTTCC |
| | | LTR-OVG5r | AAAGACGCTGCG |
| 35 | 69531 | CentA- | TGATGAGAACAT |
| | | LTR-OVG1f | AACCCGCACAGA |
| 36 | 69532 | CentA- | AGGATGATGAGG |
| | | LTR-OVG2f | ACATCACTGCCA |
| 37 | 69533 | CentA- | AACCATCTAGAA |
| | | LTR-OVG3f | TTTGAGAAGGCA |
| 38 | 69534 | CentA- | GTCCAGAAACTG |
| | | LTR-OVG4f | CCGAGTGAACTC |
| 39 | 65535 | CentA- | GAGAGAGTTTCG |
| | | LTR-OVG5f | TTCTCCATTAGA |
| 40 | 69536 | CentA- | GTTCTTGCTTGT |
| | | LTR-OVG6f | TCTCGATTGCTT |
| 41 | 69537 | CentA- | TTGGTTGTGGTA |
| | | LTR-OVG7f | GTCGGGCAGCCA |
| 42 | 69538 | CentA- | CATTAACATGGT |
| | | LTR-OVG1r | CATATCTGTGCG |
| 43 | 69539 | CentA- | TGGTGTGGTGTA |
| | | LTR-OVG2r | TTGATGGCAGTG |
| 44 | 69540 | CentA- | CTTTTATTGCCT |
| | | LTR-OVG3r | TGTTGCCTTCT |
| 45 | 69541 | CentA- | GACTTGGGTAGA |
| | | LTR-OVG4r | GCAGGAGTTCAC |
| 46 | 69542 | CentA- | AGGAATAGAAAG |
| | | LTR-OVG5r | GAGTTCTAATGG |
| 47 | 69543 | CentA- | ACAGCCTTGAAC |
| | | LTR-OVG6r | CTGCAAGCAATC |
| 48 | 69544 | CentA- | TGTTGGAGAACG |
| | | LTR-OVG7r | ACGTTGGCTGCC |
| 49 | 69555 | Cent4- | TAAGTGCAAACC |
| | | 250-OVG1f | ATTGTTAAATTT |
| 50 | 69556 | Cent4- | CACAAACCCTTA |
| | | 250-OVG2f | ACTCGAAACTAT |
| 51 | 69557 | Cent4- | ATCGAAAGATAA |
| | | 250-OVG3f | CTCATATGGCTT |
| 52 | 69558 | Cent4- | TCCACTAAAGAA |
| | | 250-OVG4f | CCAAGATTGTGA |
| 53 | 69559 | Cent4- | AATTGTACTATC |
| | | 250-OVG1r | TCTAAAATTTAA |
| 54 | 69560 | Cent4- | TTTAGGGTTTGG |
| | | 250-OVG2r | GGTTATAGTTTC |
| 55 | 69561 | Cent4- | GACCATAATGGT |
| | | 250-OVG3r | CAAAAAGCCATA |
| 56 | 69562 | Cent4- | ATATGTTGGACA |
| | | 250-OVG4r | CAAATCACAATC |
| 57 | 69634 | 18-26SrDNANTS- | CCGGAAATAAGC |
| | | OvG1f | AAAGTCCAAGCG |
| 58 | 69635 | 18-26SrDNANTS- | TATGTCTTGGGT |
| | | OvG2f | GAAGGGCATGGC |
| 59 | 69636 | 18-26SrDNANTS- | CGCAAGGCGACG |
| | | OvG3f | GGCGGCATGGCT |
| 60 | 69637 | 18-26SrDNANTS- | CGAGGGGTTCCC |
| | | OvG4f | CATGGCGCACGG |
| 61 | 69638 | 18-26SrDNANTS- | TCGGTGTCTTTC |
| | | OvG1r | CACACGCTTGGA |
| 62 | 69639 | 18-26SrDNANTS- | GTTTTCCCTCCG |
| | | OvG2r | TTCCGCCATGCC |
| 63 | 69640 | 18-26SrDNANTS- | AGACGCAAGGCC |
| | | OvG3r | GAACAGCCATGC |
| 64 | 69641 | 18-26SrDNANTS- | GGCCTCAGTTTT |
| | | OvG4r | CGGCCCGTGCGC |
| 65 | 74794 | subtelo- | GACACATGTTTT |
| | | TR430-OvG2f | TGTCGTCGAACA |
| 66 | 74795 | subtelo- | GGAGGCACGAAA |
| | | TR430-OvG2r | TCGCTGTTCGAC |
| 67 | 74796 | subtelo- | CGACCGCCACCC |
| | | TR430-OvG3f | ATGATTTGACCA |
| 68 | 74797 | subtelo- | ACCTTACCAGTC |
| | | TR430-OvG3r | TCTATGGTCAAA |
| 69 | 74799 | subtelo- | TCCCGTGAGCTA |
| | | TR430-OvG4f | TAGCACACGTTT |
| 70 | 74800 | subtelo- | GGTCGCTCGGCC |
| | | TR430-OvG4r | ATGAAAACGTGT |
| 71 | 74801 | subtelo- | CCGTGTTCCTCC |
| | | TR430-OvG5f | ACACGTGTTTTT |
| 72 | 74802 | subtelo- | AAGGTGCTCCGG |
| | | TR430-OvG5r | GGACAAAAACAC |
| 73 | 74803 | subtelo- | TTGGCCTCCCGC |
| | | TR430-OvG6f | GAGCTATATCAC |
| 74 | 74804 | subtelo- | TTGGCCACGGAA |
| | | TR430-0vG6r | ATGTGTGATATA |
| 75 | 74805 | subtelo- | TTATGTATCCGA |
| | | TR430-0vG7f | CCTGCCACCTTC |
| 76 | 74806 | subtelo- | CTCCCCGGTCTA |
| | | TR430-0vG7r | AAACGAAGGTGG |
| 77 | 74807 | subtelo- | GCCACCCGTGAG |
| | | TR430-OvG8f | CTATAGCACACG |
| 78 | 74808 | subtelo- | TAGGTTTCCATA |
| | | TR430-0vG8r | AAATCGTGTGCT |
| 79 | 65650 | 180knobOvG21- | TGTCGAAAATAG |
| | | 60f | CCATGAACGACC |
| 80 | 65651 | 180knobOvG21- | CGGTATTATTGG |
| | | 60r | AAATGGTCGTTC |
| 81 | 65652 | 180knobOvG71- | CCTACGGATTTT |
| | | 110f | TGACCAAGAAAT |
| 82 | 65653 | 180knobOvG71- | ATTTCTAGTGGA |
| | | 110r | GACCATTTCTTG |
| 83 | 65654 | 180knobOvG141- | ATGTGGGGTGAG |
| | | 180f | GTGTATGAGCCT |
| 84 | 65655 | 180knobOvG141- | ATGAGCCTCTGG |
| | | 180r | TCGATGATCAAT |
| 85 | 65656 | 5SrDNAOvG1- | GGATGCGATCAT |
| | | 40f | ACCAGCACTAAA |
| 86 | 65657 | 5SrDNAOvG1- | TGATGGGATCCG |
| | | 40r | GTGCTTTAGTGC |
| 87 | 65658 | 5SrDNAOvG61- | CTTGGGCGAGAG |
| | | 100f | TAGTACTAGGAT |
| 88 | 65659 | 5SrDNAOvG61- | TCCCAGGAGGTC |
| | | 100r | ACCCATCCTAGT |
| 89 | 65660 | 5SrDNAOvG161- | ACCATAGTAAAA |
| | | 200f | ATGGGTGACCGT |
| 90 | 65661 | 5SrDNAOvG161- | TAATTTAACACG |
| | | 200r | AGAACGGTCAC |
| 91 | 65662 | 5SrDNAOvG261- | CCGTGGGCGAGC |
| | | 230f | CGAGCACGGAGG |
| 92 | 65663 | 5SrDNAOvG261- | TCCTCTTATGCC |
| | | 230r | CACACCTCCGTG |
| 93 | 65664 | 350knobOvG31- | CTCAAATGACGT |
| | | 70f | TTCTATGATATT |
| 94 | 65665 | 350knobOvG31- | TGAATACAATGC |
| | | 70r | CCTCAATATCAT |
| 95 | 65666 | 350knobOvG121- | CTAGGTTTCCTA |
| | | 160f | TAATCCCCTCTA |
| 96 | 65667 | 350knobOvG121- | CTAGGTATGCCT |
| | | 160r | TGAATAGAGGG |
| 97 | 65668 | 350knobOvG161- | ATGTTGTTTATG |
| | | 200f | TCCACTCAAGTA |
| 98 | 65669 | 350knobOvG161- | ATGGTGTACGGT |
| | | 200r | GTTTTACTTGAG |
| 99 | 65670 | 350knobOvG261- | GTGAGATCTGTC |
| | | 300f | CAAACATAGGTT |
| 100 | 65671 | 350knobOvG261- | GGTGCCTTACAA |
| | | 300r | CCGTAACCTATG |
| 101 | | b010.m7 | GCAAACTTTATGTG |
| | | fis31 | ATCCCTTCCTCGCT |
| | | | GAACGAGATGAG |
| 102 | | b108.h15 | GGGACGGCAAGTCA |
| | | fis47 | CGGTAAGACCAGTC |
| | | | CAACCGAATGAT |
| 103 | | Cen3n. | CCAAACTTGCTGAG |
| | | pk0001. | ATTACTGGGCAATC |
| | | g11 | TGTTCGCTCGCA |
| 104 | 103022 | 23715- | CCAGGTAGTTTG |
| | | 3101-3200f | AAACAGTATTCT |
| 105 | 103023 | 23715- | ATAAAGGAAAAG |
| | | 3501-3600f | GGCAAACCAAAC |
| 106 | 103024 | 23715- | GATGCCCACATT |
| | | 1401-1500f | ATAGTGATTAGC |
| 107 | 103025 | 23715- | CCACATATAGCT |
| | | 2901-3000f | GCTGCATATGCC |
| 108 | 103026 | 23715- | CGGATCTAACAC |
| | | 3701-3800f | AAACATGAACAG |
| 109 | 103027 | 23715-1-100f | CGATGAATTTTC |
| | | | TCGGGTGTTCTC |
| 110 | 103028 | 23715- | CCTGCAGCCCTA |
| | | 101-200f | ATAATTCAGAAG |
| 111 | 103029 | 23715- | CACAGTCGATGA |
| | | 301-400f | ATCCAGAAAAGC |
| 112 | 103030 | 23715- | GCGTGCAATCCA |
| | | 901-1000f | TCTTGTTCAATC |
| 113 | 103031 | 23715- | CAACCACACCAC |
| | | 3201-3300f | ATCATCACAACC |
| 114 | 103032 | 23715- | ACTGGCAAGTTA |
| | | 3601-3700f | GCAATCAGAACG |
| 115 | 103033 | 23715- | CATGAACGTGTC |
| | | 4901-5000f | TTCAACTAGAGG |
| 116 | 103034 | 23715- | GACGGCGTTTAA |
| | | 4201-4300f | CAGGCTGGCATT |
| 117 | 103035 | 23715- | CCAAGCTCTTCA |
| | | 201-300f | GCAATATCACGG |
| 118 | 103036 | 23715- | ATACTTTCTCGG |
| | | 601-700f | CAGGAGCAAGGT |
| 119 | 103037 | 23715- | ATCCTTGGCGGC |
| | | 1001-1100f | AAGAAAGCCATC |
| 120 | 103038 | 23715- | GCAAGCTACCTG |
| | | 1101-1200f | CTTTCTCTTTGC |
| 121 | 103039 | 23715- | GCTTCTTGGCCA |
| | | 1601-1700f | TGTAGATGGACT |
| 122 | 103040 | 23715- | TTCACGCCGATG |
| | | 1801-1900f | AACTTCACCTTG |
| 123 | 103041 | 23715- | AAGCTTGCCAAC |
| | | 5001-5087f | GACTACGCACTA |
| 124 | 103042 | 23715- | CCCTGATGCTCT |
| | | 401-500f | TCGTCCAGATCA |
| 125 | 103043 | 23715- | AGAGCAGCCGAT |
| | | 801-900f | TGTCTGTTGTGC |
| 126 | 103044 | 23715- | CAGGATCCCGTA |
| | | 1301-1400f | ACTATAACGGTC |
| 127 | 103045 | 23715- | CGACCTGCAGAA |
| | | 2801-2900f | GTAACACCAAAC |
| 128 | 103046 | 23715- | ATCTAGAACGAC |
| | | 3401-3500f | CGCCCAACCAGA |
| 129 | 103047 | 23715- | ATTTGGGGGAGA |
| | | 3801-3900f | TCTGGTTGTGTG |
| 130 | 103048 | 23715- | GAGGGGGTGTCT |
| | | 3901-4000f | ATTTATTACGGC |
| 131 | 103049 | 23715- | CATGCAAGCTGA |
| | | 4801-4900f | TCTGAGCTTGGC |
| 132 | 103050 | 23715- | TCCATGCGCACC |
| | | 2101-2200f | TTGAAGCGCATG |
| 133 | 103051 | 23715- | TTCCATCCGAGT |
| | | 501-600f | ACGTGCTCGCTC |
| 134 | 103052 | 23715- | ATCCACTAGTAA |
| | | 1201-1300f | CGGCCGCCAGTG |
| 135 | 103053 | 23715- | GCCACGCAATTT |
| | | 4001-4100f | CTGGATGCCGAC |
| 136 | 103054 | 23715- | CGATAGCCGCGC |
| | | 701-800f | TGCCTCGTCTTG |
| 137 | 103055 | 23715- | CACTTGAAGCCC |
| | | 1901-2000f | TCGGGGAAGGAC |
| 138 | 103056 | 23715- | TCCTTCAGCTTC |
| | | 1701-1800f | AGGGCCTTGTGG |
| 139 | 103057 | 23715- | CACCTTGGAGCC |
| | | 2001-2100f | GTACTGGAACTG |
| 140 | 103058 | 23715- | TGCGGCTCGGTG |
| | | 2601-2700f | CGGAAGTTCACG |
| 141 | 103059 | 23715- | ACGCGACGCTGC |
| | | 4101-4200f | TGGTTCGCTGGT |
| 142 | 103060 | 23715- | CGTTCTAGATCG |
| | | 3101-3200r | GAGTAGAATACT |
| 143 | 103061 | 23715- | TGTTTCGTTGCA |
| | | 3501-3600r | TAGGGTTTGGTT |
| 144 | 33332 | 23715- | GCACACATAGTG |
| | | 1401-1500r | ACATGCTAATCA |
| 145 | 103062 | 23715- | GATATACTTGGA |
| | | 2901-3000r | TGATGGCATATG |
| 146 | 103063 | 23715- | CCCGGTAGTTCT |
| | | 3701-3800r | ACTTCTGTTCAT |
| 147 | 103064 | 23715-1-100r | ATTCGAGCCAAT |
| | | | ATGCGAGAACAC |
| 148 | 103065 | 23715- | GCCTTCTTGACG |
| | | 101-200r | AGTTCTTCTGAA |
| 149 | 103066 | 23715- | ATGGTGGAAAAT |
| | | 301-400r | GGCCGCTTTTCT |
| 150 | 103067 | 23715- | GAGGATCGTTTC |
| | | 901-1000r | GCATGATTGAAC |
| 151 | 103068 | 23715- | TGCTTTTTGTTC |
| | | 3201-3300r | GCTTGGTTGTGA |
| 152 | 103069 | 23715- | ACCTGTACGTCA |
| | | 3601-3700r | GACACGTTCTGA |
| 153 | 103070 | 23715- | AATTAAGTCAGG |
| | | 4901-5000r | CGCGCCTCTAGT |
| 154 | 103071 | 23715- | CTTGTTTCGAGT |
| | | 4201-4300r | AGATAATGCCAG |
| 155 | 103072 | 23715- | ACATAGCGTTGG |
| | | 201-300r | CTACCCGTGATA |
| 156 | 103073 | 23715- | GATCTCCTGTCA |
| | | 601-700r | TCTCACCTTGCT |
| 157 | 103074 | 23715- | CCTGCAAAGTAA |
| | | 1001-1100r | ACTGGATGGCTT |
| 158 | 103075 | 23715- | AAGGGAAAACGC |
| | | 1101-1200r | AAGCGCAAAGAG |
| 159 | 103076 | 23715- | TACCTGGTGGAG |
| | | 1601-1700r | TTCAAGTCCATC |
| 160 | 103077 | 23715- | ACGGCTGCTTCA |
| | | 1801-1900r | TCTACAAGGTGA |
| 161 | 103078 | 23715- | TGAAGCTCTTGT |
| | | 5001-5087r | TGGCTAGTGCGT |
| 162 | 103079 | 23715- | GTCTTGTCGATC |
| | | 401-500r | AGGATGATCTGG |
| 163 | 103080 | 23715- | ATTCGGCTATGA |
| | | 801-900r | CTGGGCACAACA |
| 164 | 103081 | 23715- | CGCTTCGCTACC |
| | | 1301-1400r | TTAGGACCGTTA |
| 165 | 103082 | 23715- | CGATGCTCACCC |
| | | 2801-2900r | TGTTGTTTGGTG |
| 166 | 88245 | 23715- | GGTTGTGATGAT |
| | | 3401-3500r | GTGGTCTGGTTG |
| 167 | 103083 | 23715- | GTTCGGAGCGCA |
| | | 3801-3900r | CACACACACAAC |
| 168 | 103084 | 23715- | TTTCCCTTCCTC |
| | | 3901-4000r | GCCCGCCGTAAT |
| 169 | 103085 | 23715- | TAAAACGACGGC |
| | | 4801-4900r | CAGTGCCAAGCT |
| 170 | 103086 | 23715- | ACGTCATCACCG |
| | | 2101-2200r | AGTTCATGCGCT |
| 171 | 103087 | 23715- | AGCGAAACATCG |
| | | 501-600r | CATCGAGCGAGC |
| 172 | 103088 | 23715- | AAGCCGAATTCC |
| | | 1201-1300r | AGCACACTGGCG |
| 173 | 103089 | 23715- | TTGGACTTGCTC |
| | | 4001-4100r | CGCTGTCGGCAT |
| 174 | 103090 | 23715- | TGCCCTGAATGA |
| | | 701-800r | ACTGCAAGACGA |
| 175 | 103091 | 23715- | CCGACTACAAGA |
| | | 1901-2000r | AGCTGTCCTTCC |
| 176 | 103092 | 23715- | TGCTGAAGGGCG |
| | | 1701-1800r | AGACCCACAAGG |
| 177 | 103093 | 23715- | GGACATCCTGTC |
| | | 2001-2100r | CCCCCAGTTCCA |
| 178 | 103094 | 23715- | ACATCGAGACCT |
| | | 2601-2700r | CCACCGTGAACT |
| 179 | 103095 | 23715- | AGTCTAACGGAC |
| | | 4101-4200r | ACCAACCAGCGA |
| 180 | | PCRbacmpk108h15f | GATCGTCGAATG |
| | | | GGAATCCATGGG |
| 181 | | PCRbacmpk108h15r | CCCTGAGTGAACCA |
| | | | TTTAGGAAGATCAG |
| 182 | | PCRbacmpk108h15- | TGCAACATCCAA |
| | | 2.fis47f | AGACCCAACATG |
| 183 | | PCRbacmpk108h15- | TTCCAACATGG |
| | | 2.fis47r | TTGGTGGTCAG |
| 184 | | PCRbacmpk010m07fis | TGTCATGACATCT |
| | | 31f | TGTTGCTACCCTG |
| 185 | | PCRbacmpk010m07fis | AAACCCGGAGT |
| | | 31r | TTCTATGCAGG |
| 192 | 75319 | Telo-31overgo | AGGGTTTAGGGTTTAG |
| | | primer1 | GGTTTAGGGTTTAGGG |
| 193 | 39612 | Telo-31overgo | CCCTAAACCCTAAACC |
| | | primer2 | CTAAACCCTAAACCC |

ii. BAC Library Screening Results

[0191] Colony hybridization screening identified a pool of approximately 8000 BAC clones which hybridized to at least one of the four centromere-specific probes. The 8000 BAC clones were classified into 4 groups based on their hybridization profile (Table 2).

TABLE 2

| Group | Total |
|---|---|
| All BACs containing CentA | 842 |
| All BACs containing CentC | 2479 |
| All BACs containing CRM2 | 2968 |
| All BACs containing CRM1 | 6012 |

[0192] Based on centromeric repeat composition the BAC clones were further classified into 15 sets based on the combination of probes which hybridized to each particular BAC clone (Table 3).

TABLE 3

| | # of |
|---|---|
| Group | BACs |
| BACs containing CentA & CentC & CRM1 & CRM2 | 247 |
| BACs containing CentA & CentC & CRM2; not CRM1 | 6 |
| BACs containing CentA & CentC & CRM1; not CRM2 | 45 |
| BACs containing CentA & CRM1 & CRM2; not CentC | 116 |
| BACs containing CentC & CRM1 & CRM2; not CentA | 730 |
| BACs containing CentA & CentC; not CRM1 not CRM2 | 4 |
| BACs containing CentA & CRM1; not CentC not CRM2 | 131 |
| BACs containing CentA & CRM2; not CentC not CRM1 | 27 |
| BACs containing CentC & CRM2; not CentA not CRM1 | 97 |
| BACs containing CentC & CRM1; not CentA not CRM2 | 829 |
| BACs containing CRM1 & CRM2; not CentA not CentC | 749 |
| BACs containing CentC; not CentA not CRM1 not CRM2 | 521 |
| BACs containing CRM2; not CentA not CentC not CRM1 | 966 |
| BACs containing CRM1; not CentA not CentC not CRM2 | 3165 |
| BACs containing CentA; not CentC not CRM1 not CRM2 | 266 |

[0193] The BAC clones were further classified based on the summation of BAC clones which hybridized to each particular probe (Table 4).

TABLE 4

| | |
|---|---|
| All BACs containing CentA | 842 |
| All BACs containing CentA & CentC | 302 |
| All BACs containing CentA, CentC, & CRM1 | 292 |
| All BACs containing CentA, CentC, & CRM2 | 253 |
| All BACs containing CentA & CRM1 | 539 |
| All BACs containing CentA, CRM1, & CRM2 | 363 |
| All BACs containing CentA & CRM2 | 396 |
| All BACs containing CentA, CentC, CRM1, & CRM2 | 247 |
| All BACs containing CentC | 2479 |
| All BACs containing CentC & CRM1 | 1851 |
| All BACs containing CentC & CRM2 | 1080 |
| All BACs containing CentC, CRM1, & CRM2 | 977 |
| All BACs containing CRM1 | 6012 |
| All BACs containing CRM1 & CRM2 | 1842 |
| All BACs containing CRM2 | 2968 |

[0194] One group of 247 BAC clones contains all four centromeric repeats. They comprise 0.15% of maize genome or can be present on a segment of DNA about 300 kb per centromere on average. This group of BAC clones was identified as the core set to be used first in experiments to construct a maize minichromosome. DNA was purified from all 247 BACs in the core set, digested with XmnI or RsaI, blotted and hybridized with each of the four centromeric repeats. Southern blot hybridization, confirmed that clones in this core set contained all four centromeric repeats. The BACs showed general differences in restriction fragment composition and hybridization patterns, and were further classified into 87 groups on the basis of restriction fragment similarities. One representative from each of the 87 groups (Table 5) was taken to generate core set DNA constructs and/or pools of BAC core set constructs for transformation and minichromosome assembly.

TABLE 5

| | | Insert |
|---|---|---|
| No. | Name | (kb) |
| 1 | bacm.pk101.n23 | 50 |
| 2 | bacm2.pk064.e15 | 50 |
| 3 | bacm.pk036.e13 | 60 |
| 4 | bacm2.pk179.e1 | 70 |
| 5 | bacm.pk030.a6 | 70 |
| 6 | bacm2.pk179.b18 | 75 |
| 7 | bacm.pk133.b11 | 75 |
| 8 | bacm2.pk066.m12 | 80 |
| 9 | bacm.pk119.a23 | 80 |
| 10 | bacm.pk098.h2 | 85 |
| 11 | bacm2.pk174.e4 | 90 |
| 12 | bacm2.pk116.g16 | 90 |
| 13 | bacm2.pk023.e24 | 90 |
| 14 | bacm.pk178.c10 | 90 |
| 15 | bacm.pk135.l6 | 90 |
| 16 | bacm.pk098.f3 | 90 |
| 17 | bacm.pk075.l6 | 90 |
| 18 | bacm.pk066.j14 | 95 |
| 19 | bacm2.pk099.m24 | 100 |
| 20 | bacm2.pk093.h11 | 100 |
| 21 | bacm2.pk083.a2 | 100 |
| 22 | bacm.pk179.d4 | 100 |
| 23 | bacm.pk076.m3 | 100 |
| 24 | bacm.pk070.h17 | 100 |
| 25 | bacm.pk064.n1 | 100 |
| 26 | bacm.pk011.l8 | 100 |
| 27 | bacm.pk068.p16 | 105 |
| 28 | bacm.pk012.n20 | 105 |
| 29 | bacm.pk077.k5 | 110 |
| 30 | bacm2.pk053.g23 | 110 |
| 31 | bacm2.pk034.j8 | 110 |
| 32 | bacm.pk164.b11 | 110 |
| 33 | bacm.pk062.c14 | 110 |
| 34 | bacm.pk013.m8 | 110 |
| 35 | bacm.pk056.j19 | 110 |
| 36 | bacm.pk051.g11 | 115 |
| 37 | bacm2.pk179.o14 | 120 |
| 38 | bacm2.pk096.d23 | 120 |
| 39 | bacm2.pk070.g7 | 120 |
| 40 | bacm2.pk034.g20 | 120 |
| 41 | bacm2.pk012.g19 | 120 |
| 42 | bacm2.pk115.o22 | 125 |
| 43 | bacm2.pk094.f14 | 125 |
| 44 | bacm2.pk003.g6 | 125 |
| 45 | bacm2.pk002.g7 | 125 |
| 46 | bacm.pk135.l7 | 125 |
| 47 | bacm.pk090.o5 | 125 |
| 48 | bacm2.pk100.j24 | 130 |
| 49 | bacm2.pk013.c9 | 130 |
| 50 | bacm.pk166.n7 | 130 |
| 51 | bacm.pk043.o23 | 130 |
| 52 | bacm.pk001.n1 | 130 |
| 53 | bacm.pk106.j20 | 135 |
| 54 | bacm.pk015.d19 | 135 |
| 55 | bacm.pk007.a2 | 140 |
| 56 | bacm.pk148.e2 | 140 |
| 57 | bacm.pk141.j4 | 140 |
| 58 | bacm.pk138.e14 | 140 |
| 59 | bacm.pk135.j2 | 140 |
| 60 | bacm.pk134.f15 | 140 |
| 61 | bacm.pk085.k5 | 140 |
| 62 | bacm.pk077.b21 | 140 |
| 63 | bacm.pk124.j24 | 145 |
| 64 | bacm.pk023.i5 | 145 |
| 65 | bacm.pk039.m16 | 150 |
| 66 | bacm2.pk169.a21 | 150 |
| 67 | bacm2.pk130.e20 | 150 |
| 68 | bacm.pk156.i17 | 150 |
| 69 | bacm.pk143.m18 | 150 |
| 70 | bacm.pk112.p1 | 150 |
| 71 | bacm.pk102.i4 | 150 |
| 72 | bacm.pk087.m4 | 150 |
| 73 | bacm.pk079.m11 | 150 |
| 74 | bacm.pk041.e16 | 150 |
| 75 | bacm.pk129.a4 | 150 |
| 76 | bacm.pk164.e18 | 155 |
| 77 | bacm.pk161.h1 | 155 |
| 78 | bacm.pk089.l8 | 155 |
| 79 | bacm.pk076.o15 | 160 |
| 80 | bacm.pk039.a3 | 160 |
| 81 | bacm.pk019.h24 | 160 |
| 82 | bacm2.pk158.f12 | 160 |
| 83 | bacm2.pk075.n6 | 170 |
| 84 | bacm2.pk137.f2 | 175 |
| 85 | bacm.pk093.d8 | 175 |
| 86 | bacm.pk133.b10 | 180 |
| 87 | bacm.pk178.o20 | 180 |

### D. Identification of Inverted Arrays of CentC Repeats

[0195] BAC libraries from maize lines Mo17 and B73 were searched for inverted CentC tandem arrays. A BLAST search of a Mo17 BAC-end sequence database revealed 591 BAC ends containing CentC repeats. Of these, only 45 BAC clones contained CentC repeats on both ends, and 44 BACs had CentC repeats in the same orientation, with only one BAC having CentC repeats in an inverted orientation (bacm.pk128.j21). A second BAC clone, bacm.pk008.d20 having CentC repeats in an inverted orientation was found by Southern hybridization analysis. The Southern analysis of this clone showed a hybridization pattern very similar to the pattern observed for bacm.pk128.j21. A BLAST search of the public B73 BAC-end sequence database revealed 136 BAC ends containing CentC repeats. Of these, only 5 BAC clones contained CentC repeats on both ends, and 4 BACs had CentC repeats in the same orientation, with only one BAC having CentC repeats in inverted orientation (ZMMBBb0243L15, 150 kb insertion). The DNA of bacm.pk128.j21 (80 kb insertion) and bacm.pk008.d20 were digested with XmnI restriction enzyme, which cleaves CentC repeats into short monomeric or dimeric fragments. A 10 kb XmnI fragment was isolated, subcloned and sequenced. The sequence analysis showed that one full copy plus one partial copy of the CRM1 element (SEQ ID NO: 191) is located between two inverted CentC repeats.

E. Isolation of Centromeric BAC Clones from Maize Chromosome 4

[0196] Maize chromosome 4 contains the shortest CentC repeat arrays. These arrays are present in a single stretch of DNA of approximately 300 kb as estimated by fiber-FISH. This segment may contain the core functional centromeric DNA sequences, and could potentially be represented by 2-4 overlapping BAC clones. Chromosome 4-specific centromeric BAC clones can be identified by finding unique DNA sequences located in the chromosome 4 centromeric region.

[0197] The maize Mo17 genomic BAC library, comprising 10,965 BAC end sequences was analyzed to identify unique BAC end sequences represented only once in the library. Eighty-one unique BAC end sequences were identified and selected for further characterization. A pair of PCR primers was designed to each of the 81 unique BAC end sequences for mapping on the oat-maize chromosome addition line panel and each unique sequence assigned to an individual maize chromosome.

[0198] The BAC end sequence of bacm.pk108.h15 (170 kb) from Mo17 was mapped to chromosome 4. This BAC was sequenced and 6 unique sequences, as well as all four centromeric repeats CentA, CentC, CRM1 and CRM2 were found. Using PCR, this BAC was assigned to a contig containing several BACs which also hybridize to CentC. Sequencing confirmed that two more BAC clones from this contig, bacm.pk010.m7 (170 kb), and bacm.pk184.c21 (150 kb) partially overlap with bacm.pk108.h15 and share some unique markers. Three unique DNA sequences were identified within these three BAC clones and their chromosome 4 localization was confirmed by PCR on oat-maize addition line DNA. Corresponding overgo probes (SEQ ID NOS: 102-104 in Table 1) were developed and used for screening of a B73 public BAC library.

[0199] Seven BAC clones from the B73 BAC library were selected based on hybridization to all three chromosome 4 specific probes. DNA from these BAC clones was digested with XmnI, transferred to a membrane and hybridized with all four centromeric repeat probes. Four of the selected B73 BAC clones contain CentC, CRM1, and CRM2 centromere repetitive elements: bacb.0424.d20 (150 kb); bacb.0155.h15 (175 kb); bacc.0048.g5 (170 kb); and bacc.0237.m8 (125 kb). Another three B73 BAC clones contain only CRM1 and CRM2 centromere repetitive elements: bacc.0143.i9 (205 kb); bacc.0237.j16 (175 kb); and bacc.0270.c1 (180 kb). Sequencing of the bacb.0155.h15 BAC clone confirmed that it contains significant regions of homology to chromosome 4-specific Mo17 BAC clones bacm.pk010.m7, and bacm.pk108.h15. Six of the seven BAC clones (all clones except for bacb.0424.d20) were assembled into a contig based on restriction site analysis. Two clones, bacb.0155.h15 and bacc.0143.i9, had an overlap of approximately 50 kb and covered the entire contig comprising about 240 kb.

[0200] Two groups of BAC clones representing the centromeric region of chromosome 4 from the Mo17 and B73 inbred lines were used for the production of DNA constructs for minichromosome assembly.

### F. Isolation and Purification of Chromosomal Centromeric DNA Fragments

[0201] Essentially all maize genomic DNA is heavily methylated, and this methylation pattern may play a role in the assembly, function, and/or maintenance of maize centromeres. Isolated maize genomic DNA maintaining the methylation and/or other native genomic characteristics, such as size, organization of elements, and other native nucleotide modifications, can be used to generate DNA constructs for maize minichromosome assembly.

i. Restriction Enzyme Selection

[0202] Sequence analysis of maize centromeric repeats identified a large number of restriction enzymes (six cutters) with no recognition sites within any of the centromeric repeats CentA, CentC, CRM1, or CRM2 (Table 6). These restriction enzymes should digest the bulk of genomic DNA into small DNA fragments, the majority of which being about 1-20 kb in size, while centromeric DNA is expected to be significantly longer. Chromosomal centromeric regions from maize can be isolated by partial or complete digestion of maize high-molecular weight (HMW) genomic DNA with at least one of these restriction enzymes. The fraction of digested HMW genomic DNA comprising large fragments of approximately 50 kb-about 1000 kb can be purified after pulsed field gel electorphoresis (PFGE) of maize nuclei embedded in agarose blocks.

ii. HMW Maize Genomic DNA Preparation and Characterization

[0203] HMW maize genomic DNA from Mo17 was prepared essentially as described by Liu and Whittier ((1994) Nucl Acids Res 22:2168-2169) from DNA embedded in agarose blocks by digestion with various restriction enzymes from TABLE 6 and fractionation by PFGE. Five restriction enzymes, BspTI, AatII, Cfr91, MbiI, MluI, were selected for the initial analyses. Of these, BspTI was selected for all further preparations. Blot-hybridization with labeled CentC centromeric probe revealed that the BspTI restriction enzyme produced a set of genomic centromeric DNA fragments ranging from about 50 kb to about 600 kb which were well-separated from the rest of the genomic DNA. Hybridization to the same DNA fragments with three other centromeric probes (CentA, CRM1, and CRM2) confirmed that these long DNA fragments comprising all four centromeric repeats have essentially no BspTI restriction sites. The hybridizing bands may represent individual centromeric DNA fragments that can be isolated and used to generate DNA constructs for minichromosome assembly.

TABLE 6

| Enzyme | Rec site |
|---|---|
| Aatl | AGGCCT |
| Aatll | GACGTC |
| AccBSl | CCGCTC |
| Aflll | CTTAAG |
| Ahyl | CCCGGG |
| AspMl | AGGCCT |
| Bbi24l | ACGCGT |
| Bfrl | CTTAAG |
| BpuB5l | CGTACG |
| BsiWl | CGTACG |
| BspTl | CTTAAG |
| BsrBl | GAGCGG |
| Bst31Nl | CCGCTC |
| Bst98l | CTTAAG |
| BstD102l | CCGCTC |
| BstPZ740l | CTTAAG |
| BvuBl | CGTACG |
| Cfr42l | CCGCGG |
| Cfr9l | CCCGGG |
| CfrJ4l | CCCGGG |
| Cscl | CCGCGG |
| Eae46l | CCGCGG |
| EaeAl | CCCGGG |
| EclRl | CCCGGG |
| Eco147l | AGGCCT |
| Eco29kl | CCGCGG |
| Esp4l | CTTAAG |
| Gall | CCGCGG |
| GceGLl | CCGCGG |
| Gcel | CCGCGG |
| Gdil | AGGCCT |
| Kpn378l | CCGCGG |
| Kspl | CCGCGG |
| MaeK81l | CGTACG |
| Mbil | CCGCTC |
| Mlul | ACGCGT |
| MspCl | CTTAAG |
| NgoAlll | CCGCGG |
| NgoPlll | CCGCGG |
| Pac25l | CCCGGG |
| Pae14kl | CCGCGG |
| Pae5kl | CCGCGG |
| PaeAl | CCGCGG |
| PaeBl | CCCGGG |
| PaeQl | CCGCGG |
| Pcel | AGGCCT |
| Pfl23ll | CGTACG |
| Pme55l | AGGCCT |
| PpuAl | CGTACG |
| PspAl | CCCGGG |
| PspALl | CCCGGG |
| PspLl | CGTACG |
| Sacll | CCGCGG |
| Sarl | AGGCCT |
| SchZl | CCGCGG |
| SenPT14bl | CCGCGG |
| SexBl | CCGCGG |
| SexCl | CCGCGG |
| Sfr303l | CCGCGG |
| SgrBl | CCGCGG |
| Smal | CCCGGG |
| Spll | CGTACG |
| Spul | CCGCGG |
| Sru30Dl | AGGCCT |
| SseBl | AGGCCT |
| Ssp5230l | GACGTC |
| Sstll | CCGCGG |
| Stel | AGGCCT |
| Stul | AGGCCT |
| Sunl | CGTACG |
| Vha464l | CTTAAG |
| Xcyl | CCCGGG |
| XmaCl | CCCGGG |
| Xmal | CCCGGG |
| Zral | GACGTC |

### Example 2

### Identification and Isolation of Telomeric Sequences

[0204] Any functional telomeric region, native, cloned, or synthetic, comprising a telomeric repeat can be used to make the DNA constructs. Several telomere repeats are known, including those from Tetrahymena, Paramecium, Oxytricha, Euplotes, Dictyostelium, Saccharomyces, Caenorhabditis, Trypanosoma, Leishmania, Physarum, Arabidopsis, human, and mouse.

| Telomeric Repeat | Exemplary Organism |
|---|---|
| CCCCAA (C₄A₂) | Tetrahymena, Paramecium |
| CCCCAAAA (C₄A₄) | Oxytricha, Euplotes |
| CCCTA (C₃TA) | Trypanosoma, Leishmania, Physarum |
| C₁₋₃A | Saccharomyces |
| C₁₋₈T | Dictyostelium |
| CCCTAAA (C₃TA₃) | Arabidopsis, human, mouse, Caenrhabditis |

### A. Synthetic Telomere Sequences

[0205] The highly conserved, repetitive nature of telomeric sequences allows for the chemical synthesis and/or PCR amplification of long telomeric regions suitable for vector construction. Long tracts of telomeric repeats, e.g., (CCCTAAA)n to flank minichromosome ends can be generated.

[0206] Long stretches of tandem telomeric repeats can be produced by several rounds of PCR amplification using primer pair SEQ ID NOS: 5 and 6 by mutual priming of two complementary telomeric oligonucleotides and their products. A PCR reaction using a low concentration of the primers (<0.1 μM) can produce DNA segments of about 100-10000 bp. Optionally, synthetic telomeric repeats can be produced by ligation of phosphorylated oligos. Telomeric DNA segments were cloned and used to produce DNA constructs.

### B. Identification and Isolation of Subtelomeric Sequences

[0207] i. BAC Clones Containing Telomeric Repeats

[0208] BAC clones containing subtelomeric regions comprising telomeric repeats can be used to stabilize chromosomal ends of a minichromosome construct. A number of sequences were previously identified as subtelomeric repeats (Burr et al. (1992) J Plant Cell 4:953-60). The Genbank sequence database was keyword searched for telomeric and subtelomeric sequences. Selected sequences were aligned and a common repetitive element identified (Telo266, SEQ ID NO: 189). Using SEQ ID NO: 189, several oligonucleotides were designed and used as probes to screen the Mo17 BAC library. A number of BACs were recovered, one was selected (bacm.pk107.g1), labeled, and hybridized to pachytene chromosomes. The BAC clone sequences were found in clusters on 6 out of 20 subtelomeres in maize chromosomes. The bacm.pk107.g1 BAC insert was subcloned and sequenced. Sequence analysis revealed a common repetitive element (TR430, SEQ ID NO: 190) which was used to design overgo probes (Table 1). Subtelomeric location of those repeats was confirmed by FISH to maize Mo17 and B73 pachytene chromosomes. Using the same probes, maize Mo17 genomic BAC libraries were screened by colony hybridization.

[0209] Approximately 71 BAC clones containing blocks of maize subtelomeric repeats were confirmed as having the TR430 subtelomere repeat (Table 7).

TABLE 7

| | | | |
|---|---|---|---|
| bacm.pk155.e24 | bacm.pk166.a12 | bacm.pk173.m16 | bacm.pk203.j15 |
| bacm2.pk022.m14 | bacam2.pk092.a9 | bacm2.pk114.i4 | bacm2.pk169.b21 |
| bacm2.pk177.j18 | bacm2.pk190.m10 | bacm2.pk220.h7 | bacm.pk001.k4 |
| bacm.pk009.c19 | bacm.pk024.j15 | bacm.pk024.k8 | bacm.pk036.g23 |
| bacm.pk038.g6 | bacm.pk061.i6 | bacm.pk062.g4 | bacm.pk064.f6 |
| bacm.pk070.j17 | bacm.pk071.c12 | bacm.pk073.m7 | bacm.pk082.m9 |
| bacm.pk101.h5 | bacm.pk107.g1 | bacm.pk110.h10 | bacm.pk112.b18 |
| bacm.pk123.e21 | bacm.pk125.n6 | bacm.pk132.h6 | bacm.pk141.p12 |
| bacm.pk142.b15 | bacm.pk146.l14 | bacm.pk148.j17 | bacm.pk154.a21 |
| bacm.pk155.p12 | bacm.pk157.d2 | bacm.pk164.n4 | bacm.pk165.n1 |
| bacm.pk169.n16 | bacm.pk171.d3 | bacm.pk172.m20 | bacm.pk172.n19 |
| bacm.pk172.n16 | bacm.pk173.e9 | bacm.pk173.i12 | bacm.pk174.g4 |
| bacm.pk176.g2 | bacm.pk184.e5 | bacm.pk185.o19 | bacm.pk189.a10 |
| bacm.pk197.m23 | bacm.pk198.f9 | bacm.pk198.k3 | bacm.pk200.c20 |
| bacm.pk208.j1 | bacm.pk213.f2 | bacm.pk214.i17 | bacm.pk214.k16 |
| bacm.pk214.l11 | bacm.pk214.m20 | bacm2.pk007.d1 | bacm2.pk034.k22 |
| bacm2.pk043.g14 | bacm2.pk043.j16 | bacm2.pk073.o7 | bacm2.pk102.o18 |
| bacm2.pk108.a3 | bacm2.pk117.h13 | bacm2.pk160.l2 | bacm.pk203.j15 |
| bacm.pk155.e24 | bacm.pk166.a12 | baacm.pk173.m16 | bacm2.pk169.b21 |
| bacm2.pk022.m14 | bacam2.pk092.a9 | bacm2.pk114.i4 | bacm.pk001.k4 |
| bacm2.pk177.j18 | bacm2.pk190.m10 | bacm2.pk220.h7 | bacm.pk036.g23 |
| bacm.pk009.c19 | bacm.pk024.j15 | bacm.pk024.k8 | |

[0210] Restriction fingerprinting with DpnI and blot-hybridization with TR430 probes, (CCCTAAA)n probe, and to knob 180 bp repeat probes showed at least 3 types of subtelomeric BAC clones. The first type has long tracts of TR430 related repeats longer than 10-20 kb. The second of BAC clones has TR430 related repeats which have a restriction site within the unit, wherein unit size can be 800 bp or 900 bp. Some BAC clones contained both of these two repeats. The third type of BAC clones has TR430 bp related unit around 500 bp. Some of these BAC clones also have telomeric (CCCTAAA)n related repeats. Knob 180 bp repeats are also present in 37 subtelomeric BAC clones suggesting that knob 180 bp repeats can be a part of some subtelomeric regions. Representative BAC clones of each type were taken for further analyses, retrofitting experiments, and transgenic experiments: bacm.pk038.g6; bacm2.pk063.g24; bacm.pk071.c12; bacm.pk112.b18; bacm.pk142.b15; bacm.pk173.e9. BAC inserts with subtelomeric fragments can be used in DNA constructs for minichromosome assembly in vitro, or assembly in a plant cell.

ii. Isolation of Native Chromosomal Telomeric DNA Fragments

[0211] Chromosomal telomeric fragments that retain at least one native genomic characteristic, such as methylation pattern, were purified from maize genomic DNA by size fractionation of maize genomic DNA digested with restriction enzymes which have a short recognition site of 4 bp or smaller. Native maize telomeric sequence comprises hundreds or thousands of tandem repeats of CCCTAAA at each telomere, this short telomere tandem repeat has no recognition site for any known restriction enzyme. Any short cutter restriction enzymes which recognize 2-4 bp sequence can be used, as long as they have no specificity to canonical telomeric tandem repeat (CCCTAAA)n. Short cutters digest most of genomic DNA onto small fragments which can be separated from larger telomeric DNA. Using a combination of two or more short cutting restriction enzymes can eliminate other non-telomeric DNA fragments not fragmented by the first enzyme. There are no known restriction enzymes having a recognition site within canonical tandem telomeric repeat.

[0212] Maize genomic DNA from Mo17 was digested with Sau3A restriction enzyme, most maize genomic DNA is reduced to very small fragments well below 1 kb, while the majority of telomeric DNA fragments are larger than about 15 kb as determined by blot hybridization. The overall length of Sau3A telomere DNA segments per haploid genome is about 400 kb, or 0.02% of the total maize haploid genome. Approximately 1 mg of total maize genomic DNA yields approximately 200 ng of telomeric DNA fragments in the undigested relic fraction. The genomic telomeric DNA fraction can be purified from the gel and used to generate DNA constructs for minichromosome assembly.

### Example 3

### Origin of Replication

[0213] The DNA constructs are retrofitted with DNA segments carrying replication origins to enable proper replication of the construct and/or minichromosome in the nuclei of transgenic plant cells. Any origin of replication which functions in a plant cell can be used. Available origins of replication are known and include plant origins of replication, and viral origins of replication. Optionally, if a construct will be maintained in a non-plant host cell at least one appropriate origin of replication can be included in the construct, for example bacterial and/or yeast origin(s) of replication.

A. Non-Transcribed Spacer of 18-26S rDNA

[0214] A well-established eukaryotic replication origin is the non-transcribed spacer of 18-26S rDNA (Ivessa and Zakian (2002) Genes Dev 16:2459-2464) which is likely functional in plants (Hernandez et al. (1993) EMBO J. 12:1475-85). The 18-26S rDNA NTS DNA sequences can be isolated from a variety of different plant species, such as Zea mays, Triticum aestivum, Avena sativa, Hordeum vulgare, Arabidopsis thaliana, and/or Glycine max. These sequences are cloned into constructs as single or multiple dispersed copies. Eukaryotic chromosomes typically have multiple origins of replication, therefore inclusion of multiple origins of replication in the DNA constructs may be useful. Unless otherwise stated, the 18-26S rDNA NTS sequence from maize is used in the DNA constructs (Toloczyki and Feix (1986) Nucl Acids Res 14:4969-86).

### B. Wheat Dwarf Virus (WDV) Initiator Protein (Rep)

[0215] Wheat dwarf virus (WDV) initiator protein (Rep) and its cognate origin of replication can be used for generating DNA constructs for minichromosome assembly. The wheat dwarf virus (WDV) initiator protein (Rep) and its cognate origin of replication can be used to support replication of minichromosome constructs in maize cells. The WDV origin of replication can be provided on the DNA construct (in cis), while genes needed for initiator Rep protein and cell cycle stimulating RepA protein can be provided by co-transformation on independent plasmid constructs (in trans) (Sanz-Burgos and Gutierrez (1998) Virology 243:119-129.).

### Example 4

### Polynucleotides and Polypeptides that Stimulate Growth

[0216] Polynucleotides and/or polypeptides that enhance cell growth by promoting cell division, entrance into S phase, stimulate cell division and/or growth in culture, or improve transformation can be provided before, during, or after introducing DNA constructs comprising maize centromeric sequence and/or subtelomeric fragment. Any such composition, or combination thereof can be used including polynucleotides, polypeptides, and/or other factors using any suitable delivery method.

### A. Replication Associated Protein A.

[0217] Replication protein A from wheat dwarf virus (WDV) can be provided to enhance cell growth and/or recovery of transgenic events. Both RepA that retains replication activity and a modified RepA that does not support viral replication can be used. For example, a plasmid carrying nos promoter::RepA can be co-delivered into plant cells with the DNA construct(s). Transient expression of RepA during first three days is expected to be sufficient to stimulate cell division and enhance event recovery (see, for example, WO00/50614, herein incorporated by reference)

### B. Cyclins

[0218] Cyclin proteins, involved in cell cycle modulation may enhance cell growth and recovery of transgenic events. For example, maize cyclin D can stimulate cell division and callus growth in culture and improve maize transformation. Ectopic expression of E2F induced cell proliferation in Arabidopsis, this effect was enhanced by co-expression of DPa (de Veylder et al. (2002) EMBO J. 21:1360-1368). Many cell cycle homologues, including cyclin D, cyclin E, wee1, Rb, Rbr3, E2F/DP, and the like have been isolated from plants (U.S. Pat. No. 6,518,487; WO99/61619; WO0/37645; WO02/074909; Xie et al. (1996) EMBO J. 15:4900-4908; all of which are herein incorporated by reference), and can be introduced into vectors for delivery into plant cells.

### C. Wuschel

[0219] Genes that trigger specific developmental pathways are also useful in enhancing cell growth. For example, members of the WOX family, such as wuschel (WUS) appear to stimulate cell division in both cells expressing WUS and adjacent cells. A construct comprising a polynucleotide encoding a WUS polypeptide can be used to stimulate cell division by co-transformation with the DNA construct(s). Several WUS homologues are known in plants, such as Arabidopsis and maize (e.g., Mayer et al. (1998) Cell 95:805-815; WO01/0023575; and US2004/0166563, all of which are herein incorporated by reference), and can be used to enhance the growth of transformed cells. For example, a construct comprising a maize WUS gene was constructed:

[0220] PHP21139 ubi pro::ubi 5′ UTR::ubi intron::WUS::pinII

### D. Ovule Development Protein 2

[0221] Other genes of interest include those related to the AP2/ERF family of transcription factors which are preferentially expressed in developing embryos and seeds, including Ovule development Protein 2 (ZmODP2) which is expressed early in maize embryogenesis. When ectopically expressed, ODP2 may stimulate cell growth in a variety of tissues, including non-embryonic tissues, which can facilitate the recovery of transgenic events. This gene family includes baby boom (BBM, BNM3, ODP2) which has been shown to induce ectopic somatic embryos in plants (Boutilier et al. (2002) Plant Cell 14:1737-1749). BBM/ODP2 homologues are known, including homologues from maize (WO00/75530, herein incorporated by reference) and can be delivered to plant cells to enhance cell growth. For example, a construct comprising a maize ODP2 gene was constructed:

[0222] PHP21875 ubi pro::ubi 5′ UTR::ubi intron::ODP2::pinII

### E. Knotted-1

[0223] Homeobox genes, including members of the knox gene family, such as KN1, KNAT1, and STM function in meristem initiation and/or maintenance in plants (Jackson et al. (1994) Dev 120:405-413; Lincoln et al. (1994) Plant Cell 6:1859-1876; Venglat et al. (2002) Proc Natl Acad Sci USA 99:4730-4735). Many knox family members are known in plants, including homologues from maize (Vollbrecht and Hake (1991) Nature 350:241-243; Kerstetter et al. (1994) Plant Cell 6:1877-1887; Serikawa et al. (1996) Plant Mol Biol 32:673-683) and can be used to construct vectors for delivery into plant cells.

### F. Lec1

[0224] Leafy cotyledon genes, such as Lec1 and Lec2, are involved in the regulation of embryogenesis and transcriptional activity in plants (Meinke et al. (1994) Plant Cell 6:1049-1064; Lotan et al. (1998) Cell 93:1195-1205; WO00/28058; Stone et al. (2001) Proc Natl Acad Sci USA 98:11806-11811; U.S. Pat. No. 6,492,577, herein incorporated by reference). Many homologues are known which can be used to construct vectors for delivery into plant cells.

### G. Combination of Growth Stimulating Polynucleotides

[0225] A combination of polynucleotides and/or polypeptides that enhance cell growth by promoting cell division, entrance into S phase, stimulate cell division and/or growth in culture, or improve transformation can be provided before, during, or after introducing DNA constructs comprising maize centromeric sequence and/or subtelomeric fragment. For example polynucleotides encoding a maize ODP2 (PHP21875) and a maize WUS (PH121139) can be used in transformation experiments with DNA construct(s) comprising maize centromeric and/or subtelomeric regions. In general ODP2 and/or WUS in particle bombardment co-transformation of immature maize embryos, as described in Example 6D, showed a significant increase in the frequency of transgenic events as determined by BARR phenotype and fluorescent marker protein (DsRed) expression. On average 1008 events/4800 primary embryos (21%) were observed when were provided in the transformation mixture. Without PHP21139 or PHP21875, 8 events/706 primary embryos (˜1%) were observed. Further analyses of transgenic events indicated that the ODP2 and/or WUS co-bombarded constructs were not integrated into the genome or assembled minichromosomes.

### Example 5

### Vector Construction

[0226] Vectors, circular or linear, for delivery into plant cells using any standard transformation protocol are constructed using standard molecular biology protocols, see, e.g., Sambrook et al. (1989) Molecular Cloning: A Laboratory Manual, 2nd Ed., Cold Spring Harbor Laboratory Vols. 1-3. Vectors for the transformation of plant cells are constructed by combining isolated chromosomal elements, optionally with other polynucleotides of interest, using standard techniques. The vectors include those designed to be maintained in a convenient host system such as E. coli, Agrobacterium, or yeast, as well as in plant cells. Typically, the construct further comprises a selectable and/or screenable marker that functions in plant cells to aid in the maintenance, identification, and/or selection of plant cells comprising the minichromosome construct. Further, the construct typically comprises several unique restriction sites where additional polynucleotides of interest can be cloned. The construct may also comprise site-specific recombination sites useful for recombinational cloning, and/or for later targeting and/or modification of the minichromosome. DNA constructs derived from maize BAC clones comprising centromeric sequences for direct delivery or Agrobacterium-mediated plant transformation are described below. Various components can be supplied either on the BAC clone construct, and/or in trans on separate DNA constructs.

### A. Markers

[0227] A variety of markers can be used to identify transformed cells comprising the introduced DNA construct(s). Visual markers include fluorescent proteins, such as AmCyan, ZsYellow, or DsRed (ClonTech Laboratories, Inc., Mountain View, Calif., USA). Selectable markers include PAT, BAR, GAT, and the like.

[0228] An expression cassette, PHP 23715, for delivery to plant cells comprising a red fluorescent protein (DsRed2) and a PAT selectable marker was constructed comprising the following operably linked components:

[0229] ubi pro::ubi 5′UTR::ubi intron::DsRed2::moPAT::pinII

[0230] A DNA construct, PHP 23714, comprising a cyan fluorescent protein (AmCyan) for delivery to plant cells is constructed comprising the following operably linked components:

[0231] ubi pro::ubi 5′UTR::ubi intron::AmCyan1::moPAT::pinII

B. Agrobacterium vectors

[0232] Agrobacterium binary plasmids are made using the hybrid system described by Komari et al. ((1996) Plant J 10:165-174). Derivatives of pSB11 are built as intermediate T-DNA constructs containing the desired configuration between the T-DNA border sequences. Plasmid pSB11 is obtained from Japan Tobacco Inc. (Tokyo, Japan). Construction of pSB11 from pSB21, and construction of pSB21 from starting vectors, is described by Komari et al. ((1996) Plant J 10:165-174). Description of integration of the T-DNA plasmid into the superbinary plasmid pSB1 by homologous recombination can be found in EP672752 A1. The plasmid pSB1 is also obtained from Japan Tobacco Inc. These plasmids are used for Agrobacterium-mediated transformation after making the co-integrant in LBA4404. Electro-competent cells of the Agrobacterium strain LBA4404 harboring pSB1 are created using the protocol as described by Lin (1995) in Methods in Molecular Biology, ed. Nickoloff, J. A. (Humana Press, Totowa, N.J.). Cells and DNA are prepared for electroporation by mixing 1 μl plasmid DNA (˜100 ng) with 20 μl of competent cells in a Life Technologies (now Whatman Biometra) 0.15 cm electrode gap cuvette (Whatman Biometra #11608-031). Electroporation is performed in a Cell-Porator Electroporation device using the Pulse Control unit (Whatman Biometra #11604-014) at the 330 μF setting along with the Voltage Booster (Whatman Biometra #11612-017) set at 4 kW. The system delivers approximately 1.8 kV to the Agrobacterium cells. Successful recombination is verified by restriction analysis of the co-integrant plasmid following isolation and transformation back into E. coli DH5α cells for amplification.

C. In vitro Assembly of Linear DNA Constructs via Ligation

[0233] Linear DNA construct minichromosome vectors are produced by preparing the component DNA fragments such as maize centromeric sequences, selectable markers (DsRed2 and AmCyan), eukaryotic origin(s) of replication (ori), telomeric sequences (TEL), and gene conferring resistance to bialophos (PAT) under ubiquitin promoter (ubi). In one example, linear minichromosome vectors were made from centromeric BAC clone bacm.pk128.j21 which comprises inverted repeats of CentC tandem arrays flanking a CRM1 centromeric repeat element. DNA fragments were generated from bacm.pk128.j21 by digestion with NotI and agarose gel purification. The purified fragment comprising the centromeric region was combined with specific restriction digest fragments comprising selectable marker(s) and replication origin: ubi pro::ubi 5′ UTR::ubi intron::DsRed::moPAT-18S-26S rDNA NTS (NotI/SpeI), and a second selectable marker cassette: ubi pro::ubi 5′ UTR::ubi intron::AmCyan::moPAT (NotI/SmaI), and telomeric sequences (SpeI/XhoI or SmaI/KpnI) from their constructs. DNA fragments were prepared such that each fragment comprised unique recognition sites for in vitro assembly of a unique linear structure during ligation. The assembled linearized vector comprises: TEL-(SpeI)-ubi pro::ubi 5′ UTR:ubi intron::AmCyan::moPAT-(NotI)-bacm.pk128.j21-(NotI)-ori-ubi pro::ubi 5′ UTR::ubi intron::DsRed::moPAT-(SmaI)-TEL

### D. DNA Constructs—Circular Retrofitted BAC Clone Vectors

[0234] Any centromeric and/or subtelomeric BAC clone or chromosomal fragment clone can be retrofitted with additional components for plant transformation.

[0235] The EPICENTRE EZ::TN™ pMOD™-2 MCS Transposon Construction Vector system (EpiCentre Madison, Wis., USA) is used to retrofit polynucleotides of interest into existing BAC clones. The pMOD-2 is a pUC based plasmid with a colE1 origin of replication and multiple cloning site (MCS) between the hyperactive 19 bp mosaic ends (ME) recognized by EZ-Tn5 transposase. The Tn5-2 transposon integrates randomly into each target DNA, therefore each transposistion reaction generates a small library of constructs representing different integration sites. DNA preparations of individual retrofitted clones or a group of clones can be used for transformation of plant cells.

i. Centromeric BACs

[0236] Two representatives of CentC-only BACs, bacm.pk018.l13 and bacm2.pk174.o21, were selected based on their restriction enzyme digest and Southern hybridization patterns. These BAC clones were retrofitted using the EPICENTRE EZ::TN™ pMOD™-2 MCS construction system to generate circular DNA constructs for plant transformation and minichromosome assembly.

[0237] The MCS was used to insert a DNA fragment comprising selectable markers: ubi pro::ubi 5′ UTR::ubi intron::DsRed::moPAT with or without a maize 18-26S rDNA NTS ori to produce a first version of a custom transposon construct, Tn5-1s. After cloning the DNA sequences of interest, the transposon is generated by PshAI restriction enzyme digest. Upon integration BAC constructs are transformed into E. coli, positive clones selected by colony hybridization with the transposon probes, and DNA isolated from selected positive clones.

ii. Subtelomeric BACs

[0238] Six representative BAC clones were selected from the subtelomeric BAC pool: bacm.pk038.g06, bacm2.pk063.g24, bacm.pk071.c12, bacm.pk112.b18, bacm.pk142.b15, and bacm.pk173.e09. New custom Tn5-2 transposon constructs comprising 18-26S rDNA NTS ori-ubi pro::ubi 5′ UTR::ubi intron::DsRed::moPAT, a Kan^{r} gene, and sites for three different homing restriction enzymes: I-PpoI, I-CeuI, and PI-SceI, were built and used to retrofit the subtelomeric BAC clones. The retrofitted BAC constructs are transformed into E. coli and selected on kanamycin and chloramphenicol, DNA is isolated from selected positive clones.

### E. DNA Constructs—Linearized Retrofitted BAC Clones

[0239] Additional custom Tn5-3 transposon constructs were generated. These Tn5-3 vectors comprise 18-26S rDNA NTS ori-ubi pro::ubi 5′ UTR::ubi intron::DsRed::moPAT. The constructs also comprise a Kan^{r} gene flanked by two DNA segments in inverted orientation each composed of two recognition sites for the homing restriction enzymes I-CeuI and PI-SceI, and telomeric sequence comprising arrays of telomeric repeats. After cloning the DNA sequences of interest, the transposon is generated by PshAI restriction enzyme digest. Upon integration BAC constructs are transformed into E. coli and selected on kanamycin and chloramphenicol, DNA is isolated from selected positive clones. Recombinant retrofitted BAC DNA is digested in vitro with homing restriction enzyme (I-CeuI or PI-SceI) converting the circular DNA into a linear DNA construct flanked with telomeric sequences in the correct orientation, and removing the fragment comprising Kan^{r} (FIG. 13).

[0240] Three types of centromeric BAC clones were retrofitted with this Tn5-3 vector:

1. Centromeric BAC clone with inverted blocks of centromeric CentC repeats flanking a CRM1 centromeric element bacm.pk128.j21, no CentA or CRM2 sequences;
2. Centromeric BAC clones belonging to the core set of centromeric BAC clones containing all four centromere-specific repeats CentA, CentC, CRM1, and CRM2 (Table 8); and,
3. Centromeric BAC clones from maize chromosome 4 (Table 9).

[0241] DNA samples from each BAC clone are fractionated in an agarose gel and the band containing linear retrofitted BAC construct excised. DNA is electroeluted from the agarose and used for biolistic transformation of Hi-II immature embryos 8-11 DAP (days after pollination). Optionally, these constructs can be used for microinjection of the DNA, or converted into vectors for Agrobacterium-mediated transformation.

TABLE 8

| Pool 1 | Pool 2 | Pool 3 | Pool 4 |
|---|---|---|---|
| bacm.pk007.a2 | bacm.pk011.l8 | bacm.pk001.n1 | bacm.pk109.h24 |
| bacm.pk036.e13 | bacm.pk012.n20 | bacm.pk023.i5 | bacm.pk039.a3 |
| bacm.pk066.j14 | bacm.pk013.m8 | bacm.pk043.o23 | bacm.pk039.m16 |
| bacm.pk075.l6 | bacm.pk062.c14 | bacm.pk051.g11 | bacm.pk041.e16 |
| bacm.pk076.m3 | bacm.pk064.n1 | bacm.pk056.j19 | bacm.pk077.b21 |
| bacm.pk119.a23 | bacm.pk068.p16 | bacm.pk076.o15 | bacm.pk079.m11 |
| bacm.pk133.b10a | bacm.pk070.h17 | bacm.pk087.m4 | bacm.pk085.k5 |
| bacm.pk133.b10b | bacm.pk090.o5 | bacm.pk089.l8 | bacm.pk098.h2 |
| bacm.pk133.b11 | bacm.pk098.f3 | bacm.pk093.d8 | bacm.pk102.i4 |
| bacm.pk135.i6 | bacm.pk135.l7 | bacm.pk106.j20 | bacm.pk112.p1 |
| bacm.pk178.c10 | bacm2.pk002.g7 | bacm.pk129.a4 | bacm.pk124.j24 |
| bacm2.pk023.e24 | bacm2.pk003.g6 | bacm.pk134.f15 | bacm.pk143.m18 |
| bacm2.pk064.e15 | bacm2.pk012.g19 | bacm.pk135.j2 | bacm.pk148.e2 |
| bacm2.pk066.m12 | bacm2.pk013.c9 | bacm.pk138.e14 | bacm.pk156.i17 |
| bacm2.pk083.a2 | bacm2.pk034.g20 | bacm.pk141.j4 | bacm.pk164.b11 |
| bacm2.pk093.h11 | bacm2.pk053.g23 | bacm.pk161.h1 | bacm.pk166.n7 |
| bacm2.pk099.m24 | bacm2.pk070.g7 | bacm.pk164.e18 | bacm.pk178.o20 |
| bacm2.pk116.g16 | bacm2.pk094.f14 | bacm.pk179.d4 | bacm2.pk034.j8 |
| bacm2.pk174.e4 | bacm2.pk096.d23 | bacm2.pk130.e20 | bacm2.pk075.n6 |
| bacm2.pk179.b18 | bacm2.pk100.j24 | bacm2.pk137.f2 | bacm2.pk115.o22 |
| bacm2.pk179.e1 | bacm2.pk179.o14 | bacm2.pk158.f12 | bacm2.pk169.a21 |

TABLE 9

| Chromosome | Chromosome |
|---|---|
| 4-specific | 4-specific |
| B73-pool | Mo17-pool |
| baccpk0143i9 | bacm.pk010m7 |
| bacbpk0155h15 | bacm.pk108h15 |
| bacbpk0424d20 | bacm.pk184c21 |

### F. DNA Constructs—Retrofitted Multiple BAC Combination Vectors

[0242] Centromeric BAC clones belonging to the core set of centromeric BAC clones containing all four centromere-specific repeats CentA, CentC, CRM1, and CRM2 (Table 8) were also retrofitted with the Tn5-2 vector. Tn5-2 constructs comprising ori-ubi pro::ubi 5′ UTR::ubi intron::DsRed2::moPAT, a Kan^{r} gene, and sites for three homing restriction enzymes: 1-PpoI, I-CeuI, and PI-SceI. The retrofitted BACs were cut with homing restriction enzymes I-CeuI and PI-SceI, separated by pulsed field gel electrophoresis (PFGE) under standard conditions: 1% agarose, 1×TAE, initial pulse 5 sec, final pulse 10 sec, total run time 12 hrs at 12° C. Large fragments were purified, and subjected to ligation to form multimeric DNA constructs up to 1 Mb long.

### Example 6

### Plant Transformation

[0243] Any suitable plant transformation method can be used. Similarly any plant cell and/or tissue that can be transformed, cultured, and/or regenerated into a plant can be used. These plant cells and tissues, as well as culture media and conditions, suitable transformation methods, and regeneration media and conditions are well known.

### A. Cell Types

[0244] A variety of maize cell types were evaluated for their potential as targets for minichromosome generation and construct delivery, including Black Mexican Sweet (BMS) suspension cells, meristem cells, the zygote, scutellar cells in the immature embryo, cells in cultured somatic embryos, the central cell and early endosperm cells. Methods are available to produce haploid embryos by crossing a given genotype to the RWS line, or other inducer line. Haploid immature embryos could be a good target for minichromosome delivery, either into scutellar cells 10-12 days after pollination (DAP) or into the exposed apical meristems of coleoptilar stage embryos (7-8 DAP). Important comparisons on the behavior of introduced minichromosomes into either a diploid or haploid environment could be performed, moreover, if minichromosome introduction is followed by chemically-induced chromosome doubling (e.g., colchicine, or nitrous oxide), these doubled-haploid embryos can be rapidly regenerated to produce a minichromosome-containing inbred. All of the aforementioned diploid and haploid cell types can be converted into suspension cultures and/or protoplasts, or established suspension cultures, such as BMS are suitable and can be used for transformation. Suspension cells and/or protoplasts may provide easy accessibility and optical clarity for microscopic monitoring after DNA construct delivery. Any suitable method for delivery of the construct to the plant protoplast culture can be used, including standard electroporation and PEG-mediated direct delivery methods, see, e.g., Ch. 8, pp. 189-253 in Advances in Cellular and Molecular Biology of Plants, Vol. 5, Ed. Vasil, KluwerAcad Publ (Dordrecht, The Netherlands) 1999.

### B. Microinjection of Maize

[0245] Any suitable method for microinjection of plant cells, tissues, and/or embryos can be used. Further, any composition or combination/mixture of compositions can be injected, including polynucleotides, polypeptides, cofactors, chemicals, adjuvants, and the like. Direct delivery into a zygote provides an opportunity to produce a transgenic plant without the intermediate steps of tissue culture and regeneration. For example, microinjection of maize can be done essentially as described in U.S. Pat. No. 6,300,543. Briefly, immature maize ovules are sectioned to produce nuclear slabs comprising the embryo sac, which is targeted for microinjection delivery of the transformation composition. Following microinjection, the embryo sacs are cultured in the appropriate media for propagation and plant regeneration.

### C. Agrobacterium Mediated Transformation

[0246] Agrobacterium mediated transformation of maize is performed essentially as described by Zhao (WO98/32326). Briefly, immature embryos are isolated from maize ovules and the embryos contacted with a suspension of Agrobacterium containing a T-DNA, where the bacteria are capable of transferring the DNA construct to at least one cell of at least one of the immature embryos. Optionally, the target tissue can be co-transformed with multiple Agrobacterium lines comprising T-DNAs with different DNA constructs and/or polynucleotides of interest.

Step 1: Infection Step. Immature embryos are immersed in an Agrobacterium suspension for the initiation of inoculation.
Step 2: Co-cultivation Step. The embryos are co-cultured for a time with the Agrobacterium.
Step 3: Resting Step. Optionally, following co-cultivation, a resting step may be performed. The immature embryos are cultured on solid medium with antibiotic, but without a selecting agent, for elimination of Agrobacterium and for a resting phase for the infected cells.
Step 4: Selection Step. Inoculated embryos are cultured on medium containing a selective agent and growing transformed callus is recovered. The immature embryos are cultured on solid medium with a selective agent resulting in the selective growth of transformed cells.
Step 5: Regeneration Step. Calli grown on selective medium are cultured on solid medium to regenerate the plants.

[0247] D. Particle Bombardment of Maize

[0248] Immature maize embryos are bombarded with a circular or linear DNA construct comprising an isolated maize centromeric sequence, and optionally subtelomeric region(s), origin(s) of replication, recombination docking site(s), polypeptide(s), and/or markers, for example a selectable marker gene such as PAT (Wohlleben et al. (1988) Gene 70:25-37) that confers resistance to the herbicide Bialaphos, or another suitable selectable marker or screenable marker(s), such as RFP and/or CFP. The construct may also comprise other marker genes, or be co-transformed with additional polynucleotide constructs comprising markers. Transformation is performed essentially as follows.

[0249] Immature maize ears from 8-11 DAP are surface sterilized in a solution of 30% bleach plus 0.5% Micro detergent for 20 minutes, and rinsed two times with sterile water. The immature embryos are excised, placed embryo axis side down (scutellum side up), 50 embryos per plate, on 560L medium for 1-3 days at 26° C. in the dark. Before transformation the immature embryos are transferred on to 560Y medium for 4 hours, and then aligned within the 2.5-cm target zone in preparation for bombardment.

[0250] The DNA is precipitated onto 0.6 μm (average diameter) gold pellets using a water-soluble cationic lipid Tfx™-50 (Cat# E1811, Promega, Madison, Wis., USA) as follows: prepare DNA solution on ice using 1 μg of maize centromeric DNA construct (10 μl); optionally other constructs for co-bombardment such as 50 ng (0.5 μl) PHP21875 (BBM), and 50 ng (0.5 μl) PHP21139 (WUS); mix DNA solution. To the pre-mixed DNA add 20 μl prepared gold particles (15 mg/ml) in water; 10 μl Tfx-50 in water; mix carefully. This can be stored on ice during preparation of macrocarriers, typically about 10 min. Pellet gold particles in a microfuge at 10,000 rpm for 1 min, remove supernatant. Carefully rinse the pellet with 100 ml of 100% EtOH without resuspending the pellet, carefully remove the EtOH rinse. Add 20 μl of 100% EtOH and carefully resuspend the particles by brief sonication, 10 μl spotted onto the center of each macrocarrier and allowed to dry about 2 minutes before bombardment.

[0251] The sample plates of maize target embryos are bombarded twice per plate using approximately 0.5 μg of DNA per shot using the Bio-Rad PDS-1000/He device (Bio-Rad Laboratories, Hercules, Calif.) with a rupture pressure of 450 PSI, a vacuum pressure of 27-28 inches of Hg, and a particle flight distance of 8.5 cm.

[0252] Following bombardment, the embryos are transferred to 560P solid medium kept in the dark at 26° C. for 4-6 days, then transferred to 560R selection medium containing 3 mg/L Bialaphos, and subcultured every 2 weeks. After approximately 10 weeks of selection, selection-resistant callus clones are transferred to 288J medium to initiate plant regeneration. Following somatic embryo maturation (2-4 weeks), well-developed somatic embryos are transferred to 272V medium for germination and transferred to the lighted culture room. Approximately 7-10 days later, developing plantlets are transferred to 272V hormone-free medium in tubes for 7-10 days until plantlets are well established. Plants are then transferred to inserts in flats (equivalent to 2.5″ pot) containing potting soil and grown for 1 week in a growth chamber, subsequently grown an additional 1-2 weeks in the greenhouse, then transferred to classic 600 pots (1.6 gallon) and grown to maturity.

### E. Particle Bombardment of Soybean

[0253] A polynucleotide, a mixture of polynucleotides, and optionally, polypeptide(s), can be introduced into embryogenic suspension cultures of soybean by particle bombardment using essentially the methods described in Parrott et al. (1989) Plant Cell Rep 7:615-617. This method, with modifications, is described below.

[0254] Seed is removed from immature pods and cotyledons less than 4 mm in length are selected. The seeds are sterilized for 15 minutes in a 0.5% v/v bleach solution and then rinsed with sterile distilled water. The immature cotyledons are excised by first cutting away the portion of the seed that contains the embryo axis. The cotyledons are then removed from the seed coat by gently pushing the distal end of the seed with the blunt end of the scalpel blade. The cotyledons are then placed in petri dishes (flat side up) with SB1 initiation medium. The petri plates are incubated in the light (16 hr day; 75-80 μE) at 26° C. After 4 weeks of incubation the cotyledons are transferred to fresh SB1 medium. After an additional two weeks, globular stage somatic embryos that exhibit proliferative areas are excised and transferred to FN Lite liquid medium (Samoylov et al. (1998) In Vitro Cell Dev Biol Plant 34:8-13). About 10 to 12 small clusters of somatic embryos are placed in 250 ml flasks containing 35 ml of SB172 medium. The soybean embryogenic suspension cultures are maintained in 35 mL liquid media on a rotary shaker, 150 rpm, at 26° C. with fluorescent lights (20 μE) on a 16:8 hour day/night schedule. Cultures are sub-cultured every two weeks by inoculating approximately 35 mg of tissue into 35 mL of liquid medium.

[0255] Soybean embryogenic suspension cultures are then transformed using particle gun bombardment (Klein et al. (1987) Nature 327:70; U.S. Pat. No. 4,945,050). A BioRad Biolistica PDS1000/HE instrument can be used for these transformations. A selectable marker gene can used to facilitate soybean transformation for example an expression cassette can be used comprising the 35S promoter from Cauliflower Mosaic Virus (Odell et al. (1985) Nature 313:810-812), the hygromycin phosphotransferase gene from plasmid pJR225 (from E. coli; Gritz et al. (1983) Gene 25:179-188) and the 3′ region of the nopaline synthase gene from the T-DNA of the Ti plasmid of Agrobacterium tumefaciens.

[0256] To 50 μL of a 60 mg/mL 1 μm gold particle suspension is added (in order): 5 μL DNA (1 μg/μL), 20 μl spermidine (0.1 M), and 50 μL CaCl₂ (2.5 M). The particle preparation is agitated for three minutes, spun in a microfuge for 10 seconds and the supernatant removed. The DNA-coated particles are washed once in 400 μL 70% ethanol then resuspended in 40 μL of anhydrous ethanol. The DNA/particle suspension is sonicated three times for one second each. Five μL of the DNA-coated gold particles are then loaded on each macro carrier disk.

[0257] Approximately 300-400 mg of a two-week-old suspension culture is placed in an empty 60×15 mm petri dish and the residual liquid removed from the tissue with a pipette. Membrane rupture pressure is set at 1100 psi and the chamber is evacuated to a vacuum of 28 inches mercury. The tissue is placed approximately 8 cm away from the retaining screen, and is bombarded three times. Following bombardment, the tissue is divided in half and placed into two separate flasks with 35 ml of FN Lite medium per flask.

[0258] Five to seven days after bombardment, the liquid medium is exchanged with fresh medium. Eleven days post bombardment the medium is exchanged with fresh medium containing 50 mg/mL hygromycin. This selective medium is refreshed weekly. Seven to eight weeks post-bombardment, green transformed tissue will be observed growing from untransformed, necrotic embryogenic clusters. Isolated green tissue is removed and inoculated into individual flasks to generate new, clonally propagated, transformed embryogenic suspension cultures. Each new line is treated as an independent transformation event. These suspensions are then subcultured and maintained as clusters of immature embryos, or tissue is regenerated into whole plants by maturation and germination of individual embryos.

[0259] For regeneration, events are removed from liquid culture and a maturation process is started on solid medium. Embryogenic clusters are removed from liquid SB196, blotted on sterile filter paper, and placed on solid agar media SB166 for 1-2 weeks. Tissue clumps are broken or gently squashed with spoonula. About 10-20 tissue clumps of about 4-5 mm diameter are subcultured for 3 weeks on medium SB103 or SB148, to generate embryos. Embryos are cultured for 4-6 weeks at 26° C. under cool white fluorescent and Agro bulbs (40 watt) on a 16:8 hr photoperiod with light intensity of 90-120 μE/m2s. After 4-6 weeks of maturation, individual embryos are desiccated by placing into a large (60×25 mm) sterile petri dish sealed with fiber tape, or placed in plastic box (with no fiber tape) for 4-7 days. Desiccated embryos are planted in solid SB71-4 medium in either vented round culture vessel (RCV) or into 100×25 mm petri dish, and germinated at 26° C. under cool white fluorescent and Agro bulbs (40 watt) on a 16:8 hr photoperiod with light intensity of 90-120 μE/m2s to produce plantlets. Plantlets are potted to cell pack trays and placed in an incubator at conditions of 16 hr photoperiod, 26° C./24° C. day/night temperatures for about 2 weeks before transplanting to soil for seed production.

### F. Plant Cell Culture Media

[0260] Medium 560L comprises 4.0 g/L N6 basal salts (Sigma C-1416), 1.0 ml/L Eriksson's Vitamin Mix (1000× Sigma 1511), 0.5 mg/L thiamine HCl, 20 g/L sucrose, 1.0 mg/L 2,4-D, and 2.88 g/L L-proline (brought to volume with D-I H₂O following adjustment to pH 5.8 with KOH); 2.0 g/L Gelrite® (added after bringing to volume with D-I H₂O); and 8.5 mg/L silver nitrate (added after sterilizing the medium and cooling to room temperature).

[0261] Medium 560P comprises 4.0 g/L N6 basal salts (Sigma C-1416), 1.0 ml/L Eriksson's Vitamin Mix (1000× Sigma 1511), 0.5 mg/L thiamine HCl, 30 g/L sucrose, 2.0 mg/L 2,4-D, and 0.69 g/L L-proline (brought to volume with D-I H₂O following adjustment to pH 5.8 with KOH); 3.0 g/L Gelrite® (added after bringing to volume with D-I H₂O); and 0.85 mg/L silver nitrate (added after sterilizing the medium and cooling to room temperature).

[0262] Medium 560Y comprises 4.0 g/L N6 basal salts (Sigma C-1416), 1.0 ml/L Eriksson's Vitamin Mix (1000× Sigma 1511), 0.5 mg/L thiamine HCl, 120 g/L sucrose, 1.0 mg/L 2,4-D, and 2.88 g/L L-proline (brought to volume with D-I H₂O following adjustment to pH 5.8 with KOH); 2.0 g/L Gelrite® (added after bringing to volume with D-I H₂O); and 8.5 mg/L silver nitrate (added after sterilizing the medium and cooling to room temperature).

[0263] Medium 560R comprises 4.0 g/L N6 basal salts (Sigma C-1416), 1.0 ml/L Eriksson's Vitamin Mix (1000× Sigma 1511), 0.5 mg/L thiamine HCl, 30.0 g/L sucrose, and 2.0 mg/L 2,4-D (brought to volume with D-I H₂O following adjustment to pH 5.8 with KOH); 3.0 g/L Gelrite (added after bringing to volume with D-I H₂O); and 0.85 mg/L silver nitrate and 3.0 mg/L bialaphos (both added after sterilizing the medium and cooling to room temperature).

[0264] Medium 288J comprises: 4.3 g/L MS salts (Gibco 11117-074), 5.0 ml/L MS vitamins stock solution (0.100 g/L nicotinic acid, 0.02 g/L thiamine HCl, 0.10 g/L pyridoxine HCl, and 0.40 g/L glycine brought to volume with D-I H₂O) (Murashige and Skoog (1962) Physiol Plant 15:473), 100 mg/L myo-inositol, 0.5 mg/L zeatin, 60 g/L sucrose, and 1.0 ml/L of 0.1 mM abscissic acid (brought to volume with D-I H₂O after adjusting to pH 5.6); 3.0 g/L Gelrite (added after bringing to volume with D-I H₂O); and 1.0 mg/L indoleacetic acid and 3.0 mg/L bialaphos (added after sterilizing the medium and cooling to 60° C.).

[0265] Medium 272V comprises: 4.3 g/L MS salts (Gibco 11117-074), 5.0 ml/L MS vitamins stock solution (0.100 g/L nicotinic acid, 0.02 g/L thiamine HCl, 0.10 g/L pyridoxine HCl, and 0.40 g/L glycine brought to volume with D-I H₂O), 0.1 g/L myo-inositol, and 40.0 g/L sucrose (brought to volume with D-I H₂O after adjusting pH to 5.6); and 6 g/L bacto-agar (added after bringing to volume with D-I H₂O), sterilized and cooled to 60° C.

[0266] Medium SB1 comprises MS salts (Gibco/BRL—Cat# 11117-066, 1 pk/L), B5 vitamins stock 1 ml/L, 20 mg/L 2,4-D, 31.5 g/L sucrose, 8 g/L TC Agar, pH 5.8

[0267] B5 Vitamins 1000× Stock comprises 10 g myo-inositol, 100 mg nicotinic acid, 100 mg pyridoxine HCl, 1 g thiamine, D-I H₂O to 100 ml, aliquot and store at −20° C.

G. DNA Isolation from Callus and Leaf Tissues

[0268] Putative transformation events can be screened for the presence of the transgene. Genomic DNA can be extracted from calli, leaves, or other tissue using plant nuclei separation, lysis, and HMW purification, or alternatively using a modification of the CTAB (cetyltriethylammonium bromide, Sigma H5882) method described by Stacey & Isaac (1994 in Methods in Molecular Biology Vol. 28, pp. 9-15, Ed. P. G. Isaac, Humana Press, Totowa, N.J.). Approximately 100-200 mg of frozen tissue is ground into powder in liquid nitrogen and homogenized in 1 ml of CTAB extraction buffer (2% CTAB, 0.02 M EDTA, 0.1 M TrisHCl pH 8, 1.4 M NaCl, 25 mM DTT) for 30 min at 65° C. Homogenized samples are allowed to cool at room temperature for 15 min before a single protein extraction with approximately 1 ml 24:1 v/v chloroform:octanol is done. Samples are centrifuged for 7 min at 13,000 rpm and the upper layer of supernatant collected using wide-mouthed pipette tips. DNA is precipitated from the supernatant by incubation in 95% ethanol on ice for 1 h. DNA threads are spooled onto a glass hook, washed in 75% ethanol containing 0.2 M sodium acetate for 10 min, air-dried for 5 min and resuspended in TE buffer. Five μl RNAse A is added to the samples and incubated at 37° C. for 1 h. For quantification of genomic DNA, gel electrophoresis is performed using a 0.8% agarose gel in 1×TBE buffer. One microlitre of each of the samples is fractionated alongside 200, 400, 600 and 800 ng μl-1λ uncut DNA markers.

### Example 7

### Transformation Results

[0269] Immature Hi-II maize embryos at 8-11 DAP were transformed by particle bombardment essentially as described in Example 6D. Along with the retrofitted BAC DNA construct(s), embryos were co-transformed with ODP2, WUS, and/or ODP2+WUS vectors. At two weeks post-bombardment, transformed cells had proliferated to form an embryogenic callus with multiple somatic embryos. Some of these somatic embryos expressed the fluorescent DsRed2 marker gene indicative of stable inheritance. Individual somatic embryos were excised and propagated as independent transgenic events on Bialophos selection media. Clonally propagated callus culture was established from each event.

[0270] A primary screening of each transformation event was made utilizing FISH. Individual somatic embryos were used to make chromosomal spreads for FISH as described in Example 8. Each event was characterized using separate FISH probes to the mo-PAT/DsRed2 marker (PHP23715), and the CentC tandem centromeric repeat to detect of transgenic marker and centromeric DNA sequence inheritance, respectively.

[0271] Following the primary screening, selected transformation events of interest were transferred to regeneration media to produce plantlets, which were eventually transferred into soil to recover plants. After a period of growth, the selected plants were screened a second time by FISH analysis of root tip squashes to reaffirm inheritance.

### A. Co-Transformation Experiments of Pooled BACs

[0272] The embryos were co-transformed with pools of DNA constructs. These pools can comprise combinations of DNA constructs derived from BAC clones comprising maize centromeric repeats, DNA constructs derived from BAC clones comprising telomeric and/or subtelomeric DNA segments, visual marker plasmid PHP23715, and polynucleotides encoding growth enhancing proteins Ovule Development Protein-2, ODP-2 (PHP21875) and Wushel (PHP21139) plasmids. DNA constructs derived from centromeric BAC clones include BAC clones having CentC only, CRM2 only, CentC and CRM2 only, and core BACs having all four centromeric repeats CentA, CentC, CRM1, and CRM2.

[0273] FISH analysis of 80 calli transformed with pooled BACs comprising centromeric DNA revealed 42 cytogenetically detectable events of new CentC clusters in additional to normal centromere sites. In some instances, the maize centromeric elements used for transformation inserted into the native chromosomes, resulting in dicentric structures. These insertions of centromeric DNA sequences varied in size (number of repeats), number of insertions per chromosome (up to 3 detectable in a single chromosome), and number of chromosomes with insertions (up to 4 chromosomes with at least one insertion) and all insertions co-localized with the RFP marker plasmid probe. This indicates that exogenous DNA fragments can be assembled into large blocks and integrated into a maize chromosome.

B. Transformation with Linear Minichromosome Prototype DNA Constructs Assembled by In Vitro Ligation of a Centromeric BAC Clone, Telomeric Sequences and Marker Sequences.

[0274] The Mo17 BAC clone, bacm.pk128.j21, with inverted orientation of CentC tandem repeats was identified as described in Example 1D. Telomeric sequences were generated by PCR amplification of telomeric oligonucleotides and cloned in a plasmid vector. A linear DNA construct was generated from this BAC clone by in vitro assembly with selectable markers (moPAT, AmCyan1, DsRed2), an 18-26S rRNA NTS replication origin (ori), and telomeric sequences (TEL). Each DNA fragment had recognition sites which allowed assembly of a unique structure upon ligation. The assembled linearized construct comprises:

TEL-(SpeI)-ubi pro::ubi 5′ UTR::ubi intron::AmCyan::moPAT-(NotI)-bacm.pk.128J21-(NotI)-ori-ubi pro::ubi 5′ UTR::ubi intron::DsRed::moPAT-(SmaI)-TEL

[0275] The whole ligation mixture, containing assembled construct as well as by-products of the ligation, was delivered into immature Hi-II embryos via biolistic transformation. More than two hundred events were propagated as individual callus clones based on the fluorescent and selectable marker selection (PAT). Three groups of clones were recovered: those which showed only red (72), only blue (83), or both (137) fluorescent markers. Events expressing both markers were selected for further analyzed by FISH.

[0276] In addition to simple integration events, a number of multiple integration events were observed either in the same chromosome, or in different chromosomes. In two events we observed chromosomal rearrangements. The additional insertion sites of centromeric repeat CentC co-localized with the marker probe PHP23715 suggesting possible dicentric chromosome formation. Analysis of dividing cells at anaphase showed chromosomal bridges consistent with the presence of dicentric chromosomes with two functional centromeres due to integration of exogenous centromeric CentC DNA sequences. Centromeric function is indicated by the formation of dicentric chromosomes, appearance of chromosomal bridges at anaphases, and the induction of chromosomal breaks. These results indicate that the chromosomal elements can self-assemble within the plant cell into multicopy blocks, associate with chromatin proteins, and in some cases can acquire centromeric function.

[0277] One event showed a rearranged chromosome 6 having two insertion sites of the centromeric DNA construct close to the nucleolar organizing region (NOR), as well as one additional minichromosome-like structure with one large centromeric region and one additional small insertion site of the centromeric DNA construct. The cytology of this event may be an indication of chromosomal breakage due to formation of a dicentric chromosome.

C. Transformation with Linearized Retrofitted Pooled BAC Clones

[0278] Several BAC clones were retrofitted with Tn5-3 custom made transposon using the transposase system (EPICENTRE EZ::TN™ pMOD™-2 MCS Transposon Construction Vector system (EpiCentre, Madison, Wis., USA)) essentially as described in Example 5E. They were linearized and used for biolistic transformation of maize Hi-II immature embryos:

1. Seven different variants of retrofitted bacm.pk128.j21 clone with inverted blocks of centromeric CentC repeats representing different transposase-generated insertions into the same BAC clone were pooled;
2. 84 retrofitted centromeric core set BAC clones were combined to generate 4 pools with 21 individual variants each (Table 8). Each of the four pools was used individually for biolistic transformation;
3. Retrofitted centromeric BAC clones from chromosome 4 were divided into 2 pools containing three BAC clones from B73 and three BAC clones from Mo17 (Table 9); and,
4. Pool 1 from Table 8, was divided into 4 subpools of 5 or 6 retrofitted centromeric core set BAC clones (Table 10). Each of the subpools was used individually for biolistic transformation.

TABLE 10

| Subpool 1.1 | Subpool 1.2 | Subpool 1.3 | Subpool 1.4 |
|---|---|---|---|
| bacm.pk007.a2 | bacm.pk133.b10 | bacm.pk119.a23 | bacm.pk075.l6 |
| bacm.pk036.e13 | bacm.pk077.k5 | bacm2.pk174.e4 | bacm.pk0066.j14 |
| bacm.pk178.c10 | bacm2.pk179.b18 | bacm2.pk116.g16 | bacm2.pk099.m24 |
| bacm2.pk179.e1 | bacm.pk0133.b11 | bacm2.pk023.e24 | bacm2.pk093.h11 |
| bacm2.pk064.e15 | bacm2.pk066.m12 | bacm.pk135.l6 | bacm2.pk083.a2 |
| | | | bacm.pk076.m3 |

[0279] For each example above, the Hi-II immature embryos were co-transformed with ODP2, WUS, and/or ODP2+WUS expression vectors and the retrofitted BAC pools.

[0280] Several different classes of integration events were found when linearized retrofitted constructs from BAC clones were used for transformation. For example, when the constructs from the BAC containing inverted blocks of centromeric CentC repeats (bacm.pk128.j21), or retrofitted pools or subpools of the core set of BAC clones were used for transformation:

1. Single integrations into euchromatic regions of host chromosomes;
2. Multiple integrations into euchromatic regions of host chromosomes;
3. Single integrations into centromeric region of host chromosomes;
4. Multiple integrations into centromeric regions of host chromosomes;
5. Integrations which resulted in chromosome breaks, such as new unusual variants of corn chromosomes with reduced chromosomal arms, or duplication of certain chromosomal regions, for example a chromosome 6 with two NORs, or dicentric chromosome formation;
6. Local amplification of marker and centromeric constructs upon integration;
7. Amplification of marker and centromeric constructs into extrachromosomal chromatin segments in some cells;
8. Creation of new minichromosomes having a functional centromere similar to native chromosomes, for example autonomous segregation in mitosis.

[0281] These observations indicate that retrofitted centromeric BAC clone bacm.pk128.j21 and the retrofitted core set of pooled BAC clones are capable of inducing a variety of cytogenetic effects such as dicentric chromosome formation, chromosomal breaks, local amplification of transgenic constructs and formation of extra chromosomal elements, i.e., minichromosomes.

[0282] Successful minichromosome events that resulted from retrofitting of a single BAC or pool of centromere-specific BACs with the Tn5-3 construct and its subsequent linearization into a linear transformation construct are described below:
[0283] 1) Pool 1 core set of centromeric-specific BACs (Table 8), or subpools of Pool 1 (Table 10);
[0284] 2) Pool 3 core set of centromeric-specific BACs (Table 8);
[0285] 3) a single BAC clone, bacm.pk128.j21, with inverted CentC repeats; and,
[0286] 4) three B73 chromosome 4 centromere-specific BAC clones (Table 9).

[0287] The first maize minichromosome event (CMC3 pool 1 event #14) was found among events generated by biolistic transformation with linearized Tn5-3 retrofitted core set BAC pool 1 (Table 8). On selective media actively growing embryogenic callus expressed the DsRed2 visual marker. FISH analyses at metaphase stage showed 0, 1, 2 or 3 additional minichromosomes having various forms and sizes (FIGS. 1-4). In this event, 60 of 80 nuclei surveyed had 1, 2 or 3 minichromosomes along with the normal complement of 20 native chromosomes. These artificial chromosomes ranged in size from about 20% to about 50% of the average native corn chromosome as measured at metaphase. Preliminary measurements at prometaphase show the minichromosomes relatively unchanged in size, while the native chromosomes are about 4-5 times longer, therefore the minichrosomes measured at this stage are about 5% to about 15% of the length of an average native corn prometaphase chromosome. As determined by FISH the minichromosomes are predominantly composed of centromeric repeats and Tn5-3 components. Several examples of ring chromosome formation which have more complex organization were also observed. These newly formed minichromosomes are apparently capable of replication and segregation during mitosis (FIG. 4), however segregation is not perfect and some non-disjunction was observed, resulting in cells with a change in minichromosome number. Callus of CMC3 pool 1 event #14 was kept actively growing under selection for at least 10 months, sampled at various timepoints, and analyzed by FISH to demonstrate stable maintenance of the minichromosome through many rounds of mitotic cell division. This event, CMC3 pool 1 event #14, was also analyzed by FISH for the presence of telomeres using the Telo-31 overgo probes (SEQ ID NOS: 192 and 193) using callus metaphase nuclei. Two to four telo-31 positive foci were observed on each minichromosome, wherein the two foci observed may represent 4 separate foci which cannot be distinguished at this resolution. The intensity of the telo-31 signal was generally weaker on the minichromosome as compared to the signal observed for the native chromosomes in each sample. Plants were regenerated from this event and their root tips were analyzed with FISH to determine if the minichromosome(s) were heritable through successive mitotic divisions in a greenhouse environment. Five of 19 plants regenerated from this transformation event showed the presence of a minichromosome(s). Four plants had a high incidence of nuclei with a single minichromosome plus the normal complement of 20 native chromosomes. The fifth plant had a majority of its nuclei with 1, 2 or 3 minichromosomes plus the normal complement of 20 native chromosomes. All the minichromosomes described above were comprised predominantly of centromeric repeats and Tn5-3 components.

[0288] Subsequently, retrofitted core set BAC pool 1 was further divided into four subpools having 5-6 of the retrofitted core set BAC clones (Table 10). FISH analyses demonstrated the presence of minichromosome(s) in embryonic callus generated by subpools 1.1 and 1.3. Two minichromosome events were produced from subpool 1.1: the first event had the normal complement of 20 chromosomes, plus 1 minichromosome that did not hybridize to PHP23715 marker or CentC at a detectable level; the second event showed 24-28 chromosomes, 3 copies of chromosome 6, and 1 minichromosome. Based on FISH observations, this minichromosome was positive for CentC, but was not consistently positive for the PHP23715 probe. This event may have been produced by integration and breakage of a native chromosome, and/or conditions produced by or resulting from aneuploidy. Subpool 1.3 produced 5 events. Three of the five events appeared to be de novo minichromosome formation and had the normal complement of 20 chromosomes plus 1 minichromosome, and the minichromosomes were positive for PHP23715 marker and CentC by FISH analysis of primary callus events at metaphase. One of these events, CMC3 subpool 1.3 event #27, was further analyzed by FISH for the presence of telomeres using the Telo-31 overgo probes (SEQ ID NOS: 192 and 193) using callus metaphase nuclei. This event has a very small minichromosome with two strong CentC foci and two telo-31 foci on each minichromosome. The two telo-31 foci observed may represent 4 separate foci which cannot be distinguished at this resolution. This event has a smaller minichromosome than observed in previous events. When measured at metaphase, the minichromosome is approximately 0.5 to 1 micron in length, which is about one-third to about one-half of the size of minichromosomes in other independent events. The FISH signal for telo-31 was generally weaker on the minichromosome than on the native chromosomes. Callus of CMC3 subpool 1.3 event #27 has been actively growing under selection for approximately 10 months, sampled at various timepoints, and analyzed by FISH to demonstrate stable maintenance of the minichromosome through many rounds of mitotic cell division. The two other subpool 1.3 events had 19 normal chromosomes plus one minichromosome, possibly as a result of integration and chromosome breakage. Using FISH analysis one of the two minichromosomes was positive for CentC only, and the second one was positive for both PHP23715 marker and CentC. Using FISH on metaphase nuclei of callus, all of the subpool events look essentially similar comparable samples from other minichromosome events generated, as shown in FIGS. 1, 2, 5, 6 and 9. Individual BAC clones from subpool 1.3 were further used to transform immature embryo cells. Two retrofitted vectors, bacm.pk119.a23 and bacm2.pk174.e4, produced minichromosomes. Both events contained a diploid set of maize chromosomes complemented with 1-2 minichromosomes.

[0289] Another minichromosome event was observed (FIGS. 5-8) from a biolistic transformation event of a Hi-II immature embryo with linearized retrofitted core set BAC clones pool 3 (Table 8). The resultant embryogenic callus event was positive on Bialophos selection media and expressed the DsRed fluorescent marker protein. FISH analysis showed that this event was tetra-aneuploid, with only 39 chromosomes were observed because one chromosome 6 was absent. Each nucleus had 0, 1 or 2 minichromosomes in this event. As described with the first minichromosome event from pool 1, the minichromosomes in this event were comprised predominantly of centromeric repeats and Tn5-3 components. At anaphase, the sister chromatids of the minichromosome(s) were able to segregate (FIG. 7) indicating the presence of functional centromeres. The above indicates that the minichromosomes are autonomously replicating and show stability through successive mitotic divisions.

[0290] Another minichromosome event was observed (FIGS. 9-10) from a biolistic transformation event of a Hi-II immature embryo with linearized, Tn5-3 retrofitted BAC clone bacm.pk128.j21. Again, the embryogenic callus of this event was positive on Bialophos selection media and expressed the DsRed fluorescent protein. A plant was regenerated from this event and the root tips screened via FISH. Each nucleus had 0 or 1 minichromosome. In those nuclei with a minichromosome, only 19 of the 20 native chromosomes were observed. FISH analysis on metaphase spreads showed that the single minichromosome was composed primarily of centromeric repeats and Tn5-3 components.

[0291] Another minichromosome event, bCMC4 event #73, was observed from a biolistic transformation event of a Hi-II immature embryo with linearized, Tn5-3 retrofitted three B73 chromosome 4 centromere-specific BAC clones (Table 9). The resultant embryogenic callus event was positive on Bialophos selection media and expressed the DsRed fluorescent marker protein. FISH analysis showed that this event was aneuploid, with only 19 chromosomes and 1 or 2 minichromosomes. Similar to the minichromosomes described above, the minichromosomes in this event were comprised predominantly of centromeric repeats and Tn5-3 components.

[0292] Observations on all minichromosome events indicate that newly formed minichromosomes predominantly resulted from concatenation or/and amplification of the primary linear DNA constructs delivered to the plant cells to produce a de novo minichromosome.

[0293] Three of the minichromosome events were further analyzed utilizing immunofluorescence with a fluorescently labeled antibody raised against the centromere/kinetochore-specific protein, Centromeric Protein C (CENPC). Immunostaining of nuclear spreads revealed that CENPC binds specifically to the centromeric region of native chromosomes. In addition, the CENPC localized to distinct positions on all the minichromosomes in all three minichromosome events studied (FIGS. 3, 4, 8 and 10). Coupling FISH with immunolocalization showed that the CentC repeat and the DsRed2 marker probe localization overlapped with CENPC on minichromosomes. As seen for the native chromosomes, at metaphase the minichromosomes have two distinct foci of CENPC (FIGS. 3, 8 and 10), and at anaphase the sister chromatids of the minichromosomes separate and each sister chromatid has a single foci of CENPC (FIG. 4). The above results indicate that the minichromosomes can recruit the necessary proteins, such as CENPC, for kinetochore formation, and therefore act autonomously of the native chromosomes during replication and segregation into daughter cells during mitosis and meiosis.

[0294] Several thousand bialophos-resistant, DsRed positive maize transgenic events have been generated and at least several hundred were cytologically characterized. The events show a high incidence of integration into the host chromosomes, with about 60% of events showing detectable integration by FISH. Both visual and selectable markers are present in almost 39% of the events, but not detectable by FISH analysis. To date most combinations of recombinant constructs produced minichromosomes containing both markers and CentC repeats detectable by FISH in only about 1% of the events (4 events, FIGS. 1-10). The exception is subpool 1.3 which generated minichromosomes containing both markers and CentC repeats in about 12% of the events analyzed (4 out of 34). BAC clones that successfully produced minichromosomes as described above were used in transformation experiments without co-transformation with ZmODP2 and ZmWUS vectors. Out of over 6,500 embryos initially used for transformation, one hundred and forty-nine recovered events contained integrated BAC sequences, but no minichromosomes were detected.

[0295] Several BAC clones comprising maize centromeric sequences that have produced minichromosome events individually and/or in a pool have been deposited with the Patent Depository of the American Type Culture Collection (ATCC), Manassas, Va., on May 21, 2008 and assigned Patent Deposit Nos. PTA-9213-PTA-9218. These deposits will be maintained under the terms of the Budapest Treaty on the International Recognition of the Deposit of Microorganisms for the Purposes of Patent Procedure. These deposits were made merely as a convenience for those of skill in the art and are not an admission that a deposit is required under 35 U.S.C. §112.

| | ATCC Patent |
|---|---|
| BAC Clone ID | Deposit Designation |
| bacm2.pk174.e04 | PTA-9213 |
| bacm.pk128.j21 | PTA-9214 |
| bacm2.pk116.g16 | PTA-9215 |
| bacm2.pk023.e24 | PTA-9216 |
| bacm.pk119.a23 | PTA-9217 |
| bacm.pk135.l06 | PTA-9218 |

### D. Artificial Minichromosome Size Measurements

[0296] Three of the events with autonomous maize minichromosomes were further characterized by measuring the size of the assembled minichromosome and chromosome 6, which is easily identified by the 18-26S rDNA FISH probe. All measurements were taken on metaphase nuclei, which gave most consistent measurements. Other stages are less defined and highly variable in chromosome size, for example, preliminary measurements at prometaphase show the minichromosomes relatively unchanged in size relative to metaphase measurements, while the native chromosomes are about 4-5 times longer, therefore the minichrosomes measured at this stage are about 5% to about 15% of the length of an average native corn prometaphase chromosome. Therefore, minichromosomes measured at metaphase probably appear larger relative to native chromosomes than if measured at a different stage. Chromosomes were measured using a Leica DMRXA fluorescent microscope, images captured with a Photometrics CoolSnap CCD camera and mesurements taken with Metamorph® image analysis software (Molecular Devices, Sunnyvale, Calif., USA). All measurements are in microns.

Native Chromosome 6 (n=29):

[0297] Mean=4.62 (l) and 2.38 (w)

[0298] Range=3.16-5.78 (l) and 2.06-2.70 (w)

Minichromosome (n=37):
[0299] Mean=1.29 (l) and 1.67 (w)
[0300] Range=0.75-3.07 (l) and 1.12-3.17 (w)

[0301] The maize minichromosomes are on average about 28% of chromosome 6 in length, but can range from about 13-97% of the total length of chromosome 6 at metaphase.

[0302] The size of the maize minichromosomes observed can also estimated in Mb. For example, the corn genome comprises about 2500 Mb total DNA, with chromosomes ranging in size from about 150-350 Mb, chromosome 6 is approximately 200 Mb (Seneca 60).

### E. Cytological Analysis

[0303] Minichromosome composition was analyzed using cytological methods in three events (pool 1 event #14, subpool 1.3. event #27, and bacm2.pk174.e4 event #96) where minichromosomes complemented 20 native maize chromosomes.

[0304] First native chromosomes were karyotyped in both wild type and transgenic cells using a set of repetitive probes similar to those used in Kato et al. (2004) Biochem Biophys Res Commun 321: 280-290. Probes included a non-transcribed spacer of 18-26S rDNA, a 180 bp knob repeat, microsatellite AGT repeat, and a 266 bp subtelomeric repeat, in addition to the CentC repeat. This analysis indicated that no visible chromosomal rearrangements and/or aberrations were present in native chromosomes in all three events. In addition, the minichromosomes did not hybridize to any of the probes except CentC.

[0305] Next, minichromosomes were hybridized with a mixture of five entire BAC-based constructs from subpool 1.3. This probe hybridized across the entire body of the analyzed minichromosomes, indicating they contained a high proportion of delivered DNA molecules. To detect the presence of genomic DNA sequences, we also developed a set of overgo probes specific to the LTR regions of six abundant genomic retroelements, Cinful-1, Grande, Huck, Opie-2, Prem-2/Ji, and Tekay (Mroczek and Dawe (2003) Genetics 165: 809-819). Southern hybridization indicated the presence of at least one of these retroelements in 11 out of 21 BACs from pool1. Four retroelements, Opie-2, Huck, Prem-2, and Grande, which were present in only 5 of 21 BACs, were labeled separately and used in a cocktail to paint chromosomes in minichromosome events. Minichromosomes from the event generated using pool 1 (pool 1 event #14) were found to contain these retroelements, but the origin of these retrotransposones could not be determined since 5 of these 21 pooled BACs hybridize to these sequences in Southerns. Therefore another event (subpool 1.3 event #27) generated using a smaller pool of 5 BACs, among which, only one BAC hybridized to Prem-2 but not to the other three retroelements was analyzed. This event still showed strong, interspersed coverage of the minichromosomes when all four probes were used simultaneously. However, using each of the 4 RT sequences as individual probes produced significantly different patterns. While Huck was highly interspersed across the minichromosome, the remaining three retroelements were present at low levels. For two of the events analyzed in detail, the hybridization results clearly indicated that the introduced BACs and the retroelements were interspersed with each other. For the third minichromosome event analyzed in this manner (bacm2.pk174.e4 event #96), the retroelements covered the entire body of the minichromosome while the BAC sequences covered approximately half.

[0306] Lastly, the events were hybridized with elements retrofitted into the transformation constructs, or provided by co-transformation. Hybridization with the ZmODP2 and ZmWUS probes demonstrated the incorporation of these plasmids into the minichromosomes. The artificial minichromosomes were tested for the presence of telomeric sequences by FISH using a (CCCTAAA)n probe. Telomeric DNA was detected in normal chromosomes and in every minichromosome tested. For example, in CMC3 pool 1 event #14, the larger minichromosome demonstrated the presence of 4 telomeric sequence-positive foci, one at each end of the two sister chromatids.

[0307] We conclude that minichromosomes in some events clearly resulted from chromosomal breakages, while observations made on other events were consistent with the possibility that the minichromosomes formed de novo.

### Example 8

### Methods

[0308] DNA isolation from immature ears or green leaves of maize plants was performed essentially as described in Ananiev et al. (1997) Proc Natl Acad Sci USA 94:3524-3529. BAC clone DNA was isolated using the Nucleobond plasmid kit (BD Biosciences Clontech, California) according to the manufacturer's recommendations. High molecular weight DNA preparation in agarose blocks was performed essentially as described in Liu and Whittier (1994) Nucl Acids Res 22:2168-2169. DNA restriction digestions, gel electrophoresis, Southern blotting, and filter hybridization were carried out using standard techniques as described in Sambrook et al. (1989) Molecular Cloning: A Laboratory Manual, 2nd Ed., Cold Spring Harbor Laboratory Vols. 1-3. The above references are all herein incorporated by reference.

### A. Overgo Probe Labeling for Colony and Southern Hybridization

[0309] Pooled overgos for each probe (5 μmol of each oligo) were combined with 2 μl of 10× Klenow buffer, 1 μl of Klenow enzyme (5 U/μl), 1 μl of 1 mM dGTP, 1 μl of 1 mM dTTP, [α-³²P]dCTP and [α-³²P]dATP—5 μl each, and sterile water to a final volume of 20 μl. The reaction mixture was incubated at 14° C. for 2 hours. Incorporation percentage was calculated and was considered acceptable at 50% or greater.

### B. Membrane Preparation and Hybridization

[0310] Membranes were prepared using 432 384-well plates evenly distributed between the Mo17 EcoRI and HindIII BAC libraries. A 4×4 gridding pattern that allowed 96 plates with 384 wells to be spotted onto a single Millipore Imobilon N+ nylon membrane (Bedford, Mass.) was used. The 96 plates gridded comprised 90 BAC clone plates and 6 plasmid clone plates used as gridding markers. After gridding, membranes were carefully placed bacteria side up on Luria-Bertani agar plates with 17 μg/mL chloramphenicol, the plates were covered, inverted, and grown at 37° C. overnight. After colony growth the membranes were removed from the plates and denatured in 1.5 M NaCl and 0.5 M NaOH for 5 min each, followed by neutralization in 1.5 M NaCl, 1 M Tris-HCl two times for 5 min each. Membranes were dried and treated with Proteinase K (100 mls at 1 mg/mL; Sigma, St. Louis, Mo.) for 50 min at 37° C.

[0311] Each membrane was soaked in 6×SSC, 0.5% SDS solution in plastic boxes. Filters were prehybridized at 56° C. in 6×SSC, 0.5% SDS with constant agitation for at least 20 minutes. Pooled overgo probes were denatured at 100° C. for 5 min and added to the hybridization solution which had been used for prehybridization. Hybridization was for 12-16 h at 56° C. Membranes were washed progressively for 1 h each at 56° C. in 2×SSC and 0.1% SDS (wash 1), 1.5×SSC and 0.1% SDS (wash 2), and 0.1×SSC and 0.1% SDS (wash 3). Membranes were sealed in plastic wrapped and exposed to X-ray film for 3 h to overnight. Following hybridization, the filters were stripped in 100 ml of 0.1×SSC and 0.1% SDS at 90° C. for 10 min and stored at −20° C. Membranes were used multiple times.

### C. Cytological Methods

[0312] Any suitable cytological methods, and compositions, including many standard cytological methods, preparations, and like are known in the art and can be used to examine plant tissues.

i. Preparation of Nuclei from Maize Callus Tissue
[0313] 1. Calli used for making nuclear preparations were first gassed with nitrous oxide at 150 psi for 3 hours then immediately fixed. Nitrous oxide arrests nuclei at metaphase which allows for improved chromosomal spreads for FISH analysis.
[0314] 2. Fix the callus tissue sample in 50% acetic acid for at least 1 hour. Tissue can be stored indefinitely in 50% acetic acid at −20° C.
[0315] 3. Separate somatic embryos from callus and place in 50 μl drop of PIM buffer (50 mM CaCl₂, 10 mM sodium acetate, pH 5.8) in a small petri plate.
[0316] 4. Dissect somatic embryos into smaller pieces of 0.5 mm.
[0317] 5. Wash tissue in PIM buffer 3-5 times over 1 hour to remove fixative. Slowly pipette several times to wash and replace with fresh PIM buffer.
[0318] 6. Carefully remove PIM buffer. Add 50 μl enzyme digest solution (2% w/v cellulase (Cat# CEL, Worthington Biochemical Corp. (Lakewood, N.J., USA)), 0.2% w/v pectinase (Cat# PASE, Worthington Biochemical Corp. (Lakewood, N.J., USA)); 0.5% w/v bovine serum albumin)
[0319] 7. Digest tissue at room temperature, in the dark, in a moist chamber for 1-2 hours. As the tissue begins to soften, very gently pipette and/or squash with probe to break up larger pieces and release cells.
[0320] 8. Carefully remove enzyme digest solution and replace with about 50 μl PIM buffer.
[0321] 9. Transfer free cells/nuclei to a microfuge tube. Add more PIM buffer to remaining digested tissue and gently pipette to release cells, transfer these cells to the microfuge tube, repeat as needed.
[0322] 10. Pellet cells in microcentrifuge at 500 rpm for 3 minutes, remove supernatant. Add fresh PIM buffer and gently resuspend cells. Repeat this wash step 3 more times.
[0323] 11. Remove PIM buffer and replace with 50% acetic acid. Gently resuspend cells, pellet at 500 rpm for 10 min., remove supernatant and add 50% acetic acid. Repeat.
[0324] 12. Store isolated nuclei in 50% acetic acid at −20° C. The final volume of 50% acetic acid should be 2× the volume of the nuclear pellet.
[0325] 13. Transfer 5 μl of resuspended nuclei to a glass slide, add an 18 mm² coverslip.
[0326] 14. Heat slide on a hot plate at 70° C. for 15 seconds.
[0327] 15. Remove slide from heat and gently press down on coverslip to squash the nuclei.
[0328] 16. Allow the slide to cool briefly, then dip slide in liquid nitrogen for 10-15 seconds.
[0329] 17. Remove slide from liquid nitrogen and warm coverslip with your breath.
[0330] 18. Quickly remove coverslip with the edge of a razor blade.
[0331] 19. Place slide in 2 changes of 100% EtOH for 2 minutes each.
[0332] 20. Allow slides to air dry. Store slides at −20° C. until needed.
   ii. FISH followed by Direct Immunolocalization of Nuclei

[0333] a. Overgo Probe Preparation for FISH

Overgo probes are described in Table 1.
1. Add 10 μl of 100 μM overgo mix, comprising equal concentrations of each overgo, to 5 μl of deionized water.
2. Heat at 95° C. for 1 min, then transfer to ice.
3. Add to the above mixture:
[0334] 2 μl 10×DNA polymerase buffer (100 mM Tris-HCl, pH 7.5, 100 mM MgCl₂, 7.5 mM DTT)
[0335] 0.5 μl dUTP fluorophore
   [0336] a) dUTP-Cy3 (Amersham)
   [0337] b) dUTP-FITC (Roche)
   [0338] c) dUTP-Texas Red (Molecular Probes)
[0339] 2 μl dNTPs (200 μM A-, G-, CTP; 40 μM TTP)
[0340] 0.5 μl Klenow

### 4. Incubate at 37° C. for 20 min.

[0341] 5. Clean probe using Quigen Nucleotide Extraction kit. Elute in 50 ml of 50% formamide in kit elution buffer.

[0342] b. Fluorescent In Situ Hybridization (FISH)

FISH of maize nuclei on slides was done essentially as follows:
1. Fix slide 10 min. in 1% v/v paraformaldehyde in phosphate-buffered saline (PBS) pH 7.2

### 2. Wash 2×5 min. in PBS

[0343] 4. Wash 2 min. in distilled/deionized water
5. Air dry slide
6. Hybridize 2 min at 80° C. in titrated fluorescent probe in 50% formamide in a final concentration of 50 mM MgCl₂
7. Hybridize 30 min—overnight in moist chamber at 37° C.

### 8. Wash 5 min. in 2×SSC

### 9. Wash 5 min. in 0.2×SSC

[0344] 10. Air dry slide
11. Add Vectashield® with DAPI (Cat# H-1200, Vector Laboratories, Burlingame, Calif., USA) and coverslip (5 ml mounting media/22 mm coverslip)
12. Examine under microscope using appropriate filter sets and/or immersion oil as needed.

[0345] c. Immunolocalization

[0346] After examination and characterization of FISH probe localization, these same samples can be processed and used for immunolocalization using an direct-tagged antibody probe. Immunolocalization of fluorescent-tagged polyclonal rabbit anti-CENPC antibody was done essentially as follows:

1. Remove coverslip
2. Wash 5 min. in 70% v/v EtOH to remove mounting medium and immersion oil

### 3. Wash 3×5 min. in PBS

[0347] 4. Block 1 hour at 37° C. in a moist chamber in 5% v/v normal rabbit serum (Jackson Immunoresearch, West Grove, Pa., USA) in PBS-BT (PBS with 3% w/v BSA, 0.02% w/v Na azide, 0.5% v/v Triton X-100)

### 5. Rinse in PBS

[0348] 6. Incubate overnight at 37° C. in a moist chamber with 1° antibody in 5% v/v normal rabbit serum in PBS-BT. Rabbit anti-CENPC-Cy3 (or -FITC) was used at a 1:200 dilution, final concentration 2.5 μg/mL of labeled antibody.
7. Wash 3× in PBS over 1 hour period
8. Air dry slide
9. Add Vectashield® with DAPI (Cat# H-1200, Vector Laboratories, Burlingame, Calif., USA) and coverslip (5 ml mounting media/22 mm coverslip)
10. Seal coverslip with nail polish
11. Examine under microscope using appropriate filters and/or immersion oil as needed.

[0349] d. CENPC Antibody Production and Labeling

[0350] A maize homologue of mammalian CENPC was isolated by Dawe et al. ((1999) Plant Cell 11:1227-1238) and shown to be a component of the kinetochore in maize. A 20 amino acid conserved peptide from the amino terminal domain was synthesized and used for polyclonal antibody production in rabbits (Openbiosystems, Huntsville, Ala., USA). The resulting antibodies were directly labeled with fluorophores suing the Fluorolink-AbCy3 labelling kit (GE Healthcare, UK) or Fluorescein Protein labelling kit (Roche Diagnostics Corp., Indianapolis, Ind., USA).

iii. Fiber-FISH

[0351] Extended DNA fibers on cytological slides were prepared as described in Jackson et al. (1998) Genome 41:566-572. Probes for fiber-FISH were labeled with biotin-11-dUTP (Roche, Germany) or DIG-dUTP (Roche, Germany) using Nik Translation Labeling Kit (Roche, Germany) according to manufactures recommendations. After precipitation, the probes were re-dissolved in TE buffer and stored at −20° C. For fiber-FISH, the probes were hybridized to DNA fibers in a mixture of 50% (v/v) formamide, 10% (v/v) SDS, and 2×SSC in a final volume of 10 μL. The slides were covered with cover slips, sealed with rubber cement and incubated at 80° C. for 2 min to denature both the probes and the target DNA, followed by incubation at 37° C. The post-hybridization washes and signal detection were performed as described by Zhong et al. (1996) Plant Mol Biol Rep 14:232-242. The biotin-labeled probes were detected with fluorescein-avidin DN (Vector Laboratories, Burlingame, Calif., USA), biotinylated anti-avidin D (Vector Laboratories, Burlingame, Calif., USA) and again with fluorescein-avidin DN (Vector Laboratories, Burlingame, Calif., USA). The DIG-labeled probes were detected by mouse anti-DIG monoclonal antibodies (Jackson ImmunoResearch, West Grove, Pa., USA) and Cy3-conjugated anti-mouse antibodies in sheep (Jackson ImmunoResearch, West Grove, Pa., USA). The slides were then mounted in Vectashield mounting medium (Vector Laboratories, Burlingame, Calif., USA). Preparations were examined using a Leica DMRXA fluorescent microscope, images captured with a Photometrics CoolSnap CCD camera. Images were captured using Metamorph® image analysis software (Molecular Devices, Sunnyvale, Calif., USA). Fiber-FISH was performed on 3 to 5 preparations from each line.

### D. Centromeric BAC Sequencing

[0352] Any sequencing method can be used to obtain sequence information from BAC clones or other constructs containing centromeric sequence, however the size of the clones and repetitive nature of centromeric sequences can pose technical challenges for DNA handling, preparation, sequencing, and sequence assembly into contigs.

[0353] All centromeric BAC sequences were determined by a shotgun approach using paired-end reads derived from a randomly generated sublibrary (Messing et al. (1981) Nucl Acids Res 9:309-321; Edwards et al. (1990) Genomics 6: 593-608). BAC DNA was isolated from overnight 2xYT+cloramphenicol cultures and randomly sheared by nebulization. Sheared DNA fragments were end-repaired using a combination of T4 polymerase and Polynucleotide kinase (EndRepair kit, Epicentre) and separated by agarose gel electrophoresis. DNA fractions in the range of 2 to 4 kb were recovered from gels using a gel extraction kit (Qiagen, Inc.) and subcloned into dephosphorilated, EcoRV-digested pBluescript II SK(+) (Promega). The ligation product was electroporated into DH-10B E. coli cells. Individual colonies were picked into 384-well microtiter plates with an automatic Q-Bot colony picker (Genetix) and stored in freezing media containing 6% glycerol and 100 μg/ml ampicillin.

[0354] For sequencing, individual plasmids were amplified directly from arrayed cultures using the Templiphi DNA method (GE Biosciences; Dean et al. (2001) Genome Res 11:1095-1099; Nelson et al. (2002) Biotechniques 32:S44-S47). The amplified products were diluted, denatured at 95° C. for 10 min and end-sequenced using M13 universal primers and the BigDye 3.1 fluorescent kit (ABI). Sequencing products were resolved on an ABI 3730xl automated sequencer. Individual sequences were assembled with the Phred/Phrap package (Ewing et al. (1998) Genome Res 8:175-185) and assembled contigs viewed with Consed (Gordon et al. (1998) Genome Res 8:195-202). Contig order and accuracy of the Phrap-based assembly was confirmed with Exgap (developed by A. Hua, University of Oklahoma).

[0355] Full sequence of bacm.pk128.j21 was also performed by random transposition sequencing using the template Generation System II (TGS II, Finnzymes). Direct sequencing using specific primers was also performed to resolve contig orientation and sequence gaps.

| BAC ID | Group | Source | #Contigs | SEQ ID NOs |
|---|---|---|---|---|
| bacm2.pk170.a08 | Core Set | Mo17 | 49 | Seq ID |
| | | | | 194-242 |
| bacb.pk243.l15 | Inverted CentC | B73 | 81 | Seq ID |
| | | | | 243-323 |
| bacm.pk147.d02 | Core Set | Mo17 | 50 | Seq ID |
| | | | | 324-373 |
| bacm.pk184.c21 | Ch 4 | Mo17 | 23 | Seq ID |
| | | | | 374-396 |
| bacm.pk024.f21 | Core Set | Mo17 | 40 | Seq ID |
| | | | | 397-436 |
| bacm.pk155.l13 | Core Set | Mo17 | 83 | Seq ID |
| | | | | 437-519 |
| bacm.pk010.m07 | Ch 4 | Mo17 | 47 | Seq ID |
| | | | | 520-566 |
| bacm.pk007.b16 | Core Set | Mo17 | 24 | Seq ID |
| | | | | 567-590 |
| bacm.pk128.j21 | Inverted CentC | Mo17 | 13 | Seq ID |
| | | | | 591-603 |
| bacm.pk108.h15-2 | Ch 4 | Mo17 | 48 | Seq ID |
| | | | | 604-651 |
| bacm.pk044.a19 | Core Set | Mo17 | 12 | Seq ID |
| | | | | 652-663 |
| bacb.pk155.h15 | Ch 4 | B73 | 31 | Seq ID |
| | | | | 664-694 |
| bacm.pk128.j21 | Inverted CentC | Mo17 | 2 | Seq ID |
| | | | | 695-696 |
| bacm2.pk023.e24 | subpool 11-15 | Mo17 | 9 | Seq ID |
| | | | | 697-705 |
| bacm2.pk116.g16 | subpool 11-15 | Mo17 | 23 | Seq ID |
| | | | | 706-728 |
| bacm2.pk174.e04 | subpool 11-15 | Mo17 | 16 | Seq ID |
| | | | | 729-744 |
| bacm.pk135.l06 | subpool 11-15 | Mo17 | 19 | Seq ID |
| | | | | 745-763 |
| bacm.pk119.a23 | subpool 11-15 | Mo17 | 47 | Seq ID |
| | | | | 764-810 |

What is claimed is:

1. An artificial plant minichromosome comprising a functional centromere that specifically binds centromeric protein C (CENPC), wherein the minichromosome specifically hybridizes under stringent hybridization conditions to a polynucleotide selected from the group consisting of:
(a) a polynucleotide comprising at least one plant centromeric element, wherein the polynucleotide is selected from the group consisting of bacm.pk128.j21, bacm2.pk023.e24, bacm2.pk116.g16, bacm2.pk174.e04, bacm.pk135.l06, and bacm.pk119.a23;
(b) a polynucleotide comprising at least one plant centromeric element, wherein the polynucleotide is provided in an American Type Culture Collection deposit selected from the group consisting of ATCC designations PTA-9214, PTA-9213, PTA-9215, PTA-9216, PTA-9217, and PTA-9218;
(c) a polynucleotide comprising a nucleic acid sequence from bacm2.pk170.a08, wherein the polynucleotide is selected from the group consisting of SEQ ID NOS: 194-242;
(d) a polynucleotide comprising a nucleic acid sequence from bacb.pk243.l15, wherein the polynucleotide is selected from the group consisting of SEQ ID NOS: 243-323;
(e) a polynucleotide comprising a nucleic acid sequence from bacm.pk147.d02, wherein the polynucleotide is selected from the group consisting of SEQ ID NOS: 324-373;
(f) a polynucleotide comprising a nucleic acid sequence from bacm.pk184.c21, wherein the polynucleotide is selected from the group consisting of SEQ ID NOS: 374-396;
(g) a polynucleotide comprising a nucleic acid sequence from bacm.pk024.f21, wherein the polynucleotide is selected from the group consisting of SEQ ID NOS: 397-446;
(h) a polynucleotide comprising a nucleic acid sequence from bacm.pk155.l13, wherein the polynucleotide is selected from the group consisting of SEQ ID NOS: 437-519;
(i) a polynucleotide comprising a nucleic acid sequence from bacm.pk010.m07, wherein the polynucleotide is selected from the group consisting of SEQ ID NOS: 188, and 520-566;
(j) a polynucleotide comprising a nucleic acid sequence from bacm.pk007.b16, wherein the polynucleotide is selected from the group consisting of SEQ ID NOS: 567-590;
(l) a polynucleotide comprising a nucleic acid sequence from bacm.pk128.j21, wherein the polynucleotide is selected from the group consisting of SEQ ID NOS: 191, 591-603, and 695-696;
(m) a polynucleotide comprising a nucleic acid sequence from bacm.pk108.h15-2, wherein the polynucleotide is selected from the group consisting of SEQ ID NOS: 186-187, and 604-651;
(n) a polynucleotide comprising a nucleic acid sequence from bacm.pk044.a19, wherein the polynucleotide is selected from the group consisting of SEQ ID NOS: 652-663;
(o) a polynucleotide comprising a nucleic acid sequence from bacb.pk155.h15, wherein the polynucleotide is selected from the group consisting of SEQ ID NOS: 664-694;
(p) a polynucleotide comprising a nucleic acid sequence from bacm2.pk023.e24, wherein the polynucleotide is selected from the group consisting of SEQ ID NOS: 697-705;
(q) a polynucleotide comprising a nucleic acid sequence from bacm2.pk116.g16, wherein the polynucleotide is selected from the group consisting of SEQ ID NOS: 706-728;
(r) a polynucleotide comprising a nucleic acid sequence from bacm2.pk174.e04, wherein the polynucleotide is selected from the group consisting of SEQ ID NOS: 729-744;
(s) a polynucleotide comprising a nucleic acid sequence from bacm.pk135.l06, wherein the polynucleotide is selected from the group consisting of SEQ ID NOS: 745-763; and,
(t) a polynucleotide comprising a nucleic acid sequence from bacm.pk119.a23, wherein the polynucleotide is selected from the group consisting of SEQ ID NOS: 764-810; and,
(u) a polynucleotide having at least 90% sequence identity to the polynucleotide of any one of (a)-(t).

2. The artificial plant minichromosome of claim 1 wherein said minichromosome further comprises at least one functional telomere.

3. The artificial plant minichromosome of claim 1, wherein the minichromosome is between at least about 5 Mb to about 50 Mb.

4. A plant cell comprising the artificial minichromosome of claim 1.

5. The plant cell of claim 4, wherein the plant cell is selected from the group consisting of maize, rice, wheat, oat, barley, sorghum, millet, soybean, sunflower, safflower, Brassica, alfalfa, cotton, and Arabidopsis.

6. The plant cell of claim 5, wherein the plant cell is from maize.

7. A plant comprising the artificial minichromosome of claim 1.

8. The plant of claim 7, wherein plant is selected from the group consisting of maize, rice, wheat, oat, barley, sorghum, millet, soybean, sunflower, safflower, Brassica, alfalfa, cotton and Arabidopsis.

9. The plant of claim 8, wherein the plant is maize.

10. An artificial plant minichromosome comprising a functional centromere that specifically binds centromeric protein C (CENPC), wherein the functional centromere comprises:
at least two arrays of tandem repeats of CentC in an inverted orientation wherein the first array comprises at least fifty copies of CentC and the second array comprises at least fifty copies of CentC; and, at least one copy of a retrotransposable element, wherein the retrotransposable element is situated between the first and the second array,
wherein the minichromosome specifically hybridizes under stringent hybridization conditions to a polynucleotide selected from the group consisting of:
(a) a polynucleotide from bacm.pk128.j21;
(b) a polynucleotide provided in American Type Culture Collection deposit designation PTA-9214;
(c) a polynucleotide comprising a nucleic acid sequence from bacm.pk128.j21, wherein the polynucleotide is selected from the group consisting of SEQ ID NOS: 191, 591-603, and 695-696; and,
(d) a polynucleotide having at least 90% sequence identity to the polynucleotide of any one of (a)-(c).

11. The artificial plant minichromosome of claim 10, wherein the retrotransposable element is selected from the group consisting of CentA, CRM1, and CRM2.

12. The artificial plant minichromosome of claim 10, wherein said minichromosome further comprises at least one functional telomere.

13. The artificial plant minichromosome of claim 10, wherein the minichromosome is between at least about 5 Mb to about 50 Mb.

14. A plant cell comprising the artificial minichromosome of claim 10.

15. The plant cell of claim 14, wherein the plant cell is selected from the group consisting of maize, rice, wheat, oat, barley, sorghum, millet, soybean, sunflower, safflower, Brassica, alfalfa, cotton, and Arabidopsis.

16. The plant cell of claim 15, wherein the plant cell is from maize.

17. A plant comprising the artificial minichromosome of claim 10.

18. The plant of claim 17, wherein plant is selected from the group consisting of maize, rice, wheat, oat, barley, sorghum, millet, soybean, sunflower, safflower, Brassica, alfalfa, cotton and Arabidopsis.

19. The plant of claim 18, wherein the plant is maize.

The application's sequence listing, which the Patent Office published only in electronic form, follows.

SEQUENCE LISTING (810 sequences)

SEQ ID NO: 1 - DNA, 4635 bp, Zea mays
  source: /note="CentA"
tgatgagaacataacccgcacagatatgaccatgttaatggctcctgctacaaagacattgaggaacaaagaagttgattggggaccaagtaatgatatttccaacatttccaacaaagcaagcacatcatcaaatttaaagatatacttgggtgaggagcatacactagagtcgaggacgactctattacaagaaggggaggatgatgaggacatcactgccatcaatacaccacaccagcgacctccttcaccatttaataatggaccagtaaacgagtccgtgcacgtaaattttattatcaggtgaactcgttccttattgttgaagctaatcattccttaaatgaggtactaataccttgtgattactttattaatctaaggtgtttgggaggtgaaccatctagaatttgagaaggcaacaaggcaataaaagctgctccacttgaggggatttcgaaactacaacaagtgcaagtttaagagggcatatctttcagctcctaaggttgtttaatgcaaataagcacttgttggaaaggtctctttgtctactttctagtggatcaagaatcaacgagagatcagacactaagtgtccagaaactgccgagtgaactcctgctctacccaagtcaatttcgtaactgcagcatgcaccaaattaaatggagcataactttccactcccaaggttgtttagtgcaaataactacttgttggaaagctctcttcgtctactttcatgtgcatcaataatcaatgacagaaaccaaacgaggcgtccagaaactgccgagagagtttcgttctccattagaactcctttctattcctctatttaagcaactagcagccaccaaagaacttgggtttttgtttgatgtaagtttagcctttgctacttccttgtaaacgcatgtgtcggctagaccacccggatacttgaaacagaaccccaactctatcagatccgtgagtgtctgctttttatcttgttcttgcttgttctcgattgcttgcaggttcaaggctgttcttggcacggcaagggcagcaacaacaggagccgatgtaactatcgctaaggcgcagcacccttgtggttgttgtagtcggatagcacaacgtcgacctccaccccaaatcgtagttatcaggagacggtgtacctgtcgctcaaggcgccacaccatcttggttgtggtagtcgggcagccaacgtcgttctccaacaagtttccacctccatcatctctcatcgaaagatcgggcacccttctacccgttgggtttatcaagtggtatcaaatttcaggttgctcggtgagagatctcaatcttccttgttttgtttacctacagtccacttttgcccaaagatatatttagagcagaaattcacctaaaaacagtttgagcctttgctttactacttagttttcgacttgttgaattccggtagctgcatttgggtcgagttgctggtctaaagttttcttaccgctagagtttcgagttcgcgccaccttgtttcaatcaccagtttagacctcttgctgcaattcaaccaaaaagaagagaaagcaaaaggcgagtgcacaaaaaaagccgcactaatcagcaaaacaaaaaaagacacgtgcaaaacaaaagagagagaaaaaaaccagttctgaattttggtagataaaatttgtaagtgcaacaaaacaaaaggcagtttgtgtgccttctttttatagtttcagaaatcagattgttgttctgagcttttggtgatactatttgtgtaacggctcgcgtctctattacggtttggactaggaccagcacaacaccttgtggaacgtttattcaacttgttgtggctaacgtggtactagctattccttggaactattgtttaaacagccacctataaatccacaaaattttctacaacaccaccaggttgtgctagcagccactgttgttgttgttcgtgctgtttgccagcgcctcctgctttgcgtggtgagaacttgtaagaacttgtttaaccagtttgagagtgagagattacaacaatgattcctagtagtttatagaatcaaagatattttttattgtttcttgtctttactaaacatggcaggtgatatggacatttttgacccaaccgaacgttatattggaggcatcattcaacacttgcctttatatgccggtaaattcgatcctcatgcatacattgattgggagctaaagctagataaggaatttgataagcatgatctatctcaaaaacaaaagatttatattgcctctaatttgttaactgagcacgcattgatggaatggaaatacatttgtaggcacaacaaagttccacaatcttgggaagacttcaaacttcattttagagatgcattcattcctgcatactatgctgatcatttgctttctaaattagacaccttaaagcagggtgctaggactgtgaaagattattattatgattttaaaatttttaccatgtttgctcgtttagatgaatgcatggaagatgtcatgactaggttcatgaaaggactcaattctgaaattcagactatagtcatgcatgaagcatacaaacacatttctcacttgtttttgcttgcatgtaaagctgaaaatgagattctattatacaattatacaagcactgaacatgtgagccataattcctcttttgcatcttctctacatgctgatcaagaacacaaaataatgaaaccagctgttgtttttccatcatcacaagaagaattgattgctgacacttgtgatagtgaagatttgtgggataatgattcacatgtactaagacaacaactagtaaatgaacatgttacatctattattgaaccaaacattttggctaaaaaggaacatgtaatttgtattgcaaacgaaactgaagaaataaatttgctctcttctttaaatacttggggctatattgaatttgatgatctttttgagctcggtaatttggaaaatattttatttgctagattcaactataccatgtccttctcatgatatattttatattgctggcaagtacaacaacataggacaatttcttgtgcatagaatttctatttcatctagatatgttgtttcttcactttgtgcaaataagatattggtatgttctcaagaagaaaagaatctcttgtttccatgtactttagttgaagtttcaggtttatatttgaaagacattaataaaagcttagtcatcaacatcaatcatgatgcaaaaccgaggacggtttgctatcaagaaggggagaatgatgagaacataacccgcacagatatgaccatgttaatggctcctgctacaaagacattaaggaacaaagaagttgattggggaccaagtaatgatattttcaacatttccaacaaagcaagcacatcatcaaatttaaagatatacttgggtgaggagcatacactagagtcgaggacgactctattacaagaaggggaggacgatgaggacatcactgccatcaatacaccacaccagcgacctccttcaccatttaataatggaccagtaaacgagtccgtgcacgtaaatttaattatcaggtgaactcgttccttgttgttgaagctaatcattccttaaatgaggtactaataccttgtgattactttattattctaaggtgtttgggaggtgaaccatctagaatttgagaaggcaacaaggcaataaaagttgctccacttgaggggatttcgaaactacaacaagtgcaagtttaagagggcatatctttcagctcctaaggttgtttaatgcaaataagcacttgttggaaaggtctctttgtctactttctagtggatcaagaatcaacgagagatcagacactaagtgtccagaaactgccgagtgaactcctgctctacccaagtcaatttcgtaactgcagcatgcaccaaattaaatggagcataactttccactcccaaggttgtttagtgcaaataactacttgttggaaagctctcttcgtctactttcatgtgcatcaataatcaatgacagaaaccaaacgaggcgtccagaaactgccgagagagtttcgttctccattagaactcctttctattcctctatttaagcaactagcagccaccaaagaacttgggtttttgtttgatgtaagtttagcctttgctacttccttgtaaactcatgtgtcggctagaccacccggatacttgaaacaaaaccccaactctatcagatccgtgagtgtctgctttttatcttgttcttgcttgttctcgattgcttgcaggttcaaggctgttcttggcacggcaagagcagcaacaacaggagccggtgtaactatcgctaaggcgcagcacccttgtggttgttgtagtcggatagcacaacgtcgacctccaccccaaatcgtagttatcaggagacggtgtacctgtcgctcaaggcaccacaccatcttggttgtggtagtcgggcagccaacgtcgttctccaacaagttttccacctccatcatctctcatcgaaagatcgggcacccttctacccgttgcgtttatcaa

SEQ ID NO: 2 - DNA, 156 bp, Zea mays
  source: /note="CentC"
ggttccggtggcaaaaactcgtgctttgtatgcaccccgacacccgttttcggaatgggtgacgtgcgacaacgaaattgcgcgaaaccaccccaaacatgagttttggacctaaagtagtggattgggcatgttcgttgcgaaaaacgaagaaat

SEQ ID NO: 3 - DNA, 6915 bp, Zea mays
  source: /note="CRM1"
cttggtcttggacagtacctcactgatgaagtagacctgatgaagctgaggtgcccgatctttcggcgagtagagataattccgatttggcggaagatgacccttgcgatccgactacgacgagcaagcccgaggcgccaatgcaatcgctgaaccaactccctgtggttaccgaccttgctgatgcgagatcggcctgatcacgaagatcgtttcctgtgcgcaatcgaagaacgaacaagaataagatgcgagcaatctaatctattactcgagggtggagttctgaatacacgaagacagcgcagattagcgcgtgttcgagagtagctaaggctaacgtaaaacaaaactcaggaaataaaggaggcgcagctcctgaataaatagagagggggcgcagcccctaggggcggccaaccctaggtcgtccattatgggccgcaattgggctggtcgtctattcttccgggccttcgttctttaacaacatgatgtagttcaattctcttgcacgggcccgagtcactggcccaggtggaaggggtggcgcctgggctggagaaggtgctgctggtgtagatgtgctcgtgttggtgttgatgtccgcatcatcctccccttcttgaactgaagtcgtcctcgacggcaactcctcatcttctcccgcatacggtttcaaatctgcaacattaaaactagtggaaacaccaaactccgcaggtaggtcgagggtataagcattatcattaatcttggttagtatcttaaaaggaccagcagcacgaggcatcaatttagaacggcgcaaagtaggaaaacgatcctttctcaaatgcaaccaaaccatatcaccaggttcaaaagtaacatgttttcttcctttactaccagcaacctgattttttgtattagtagcagcaatgttctgtttcgtttgttcatgtatggtaatcatttgttcaacatgtgcagaagcatctacatgtggggcgttcgcagcattaagtgaaatcaaatcaataggtgccctaggaatgtaaccataaacaatctggaaagggcacatctttgtagaagaatgcgtggcatgattgtaagcaaattcaacatgaggcaagcaatcctcccaacgtcgcaaattcttgtctaaaacagccctaagcatggtagataaagttctatttactacctcagtttgtccatcagtttgagggtgacaagtagtgctaaacaacaatttagttcccaatttattccaaagagatctccaaaaatggcttagaaacttagcatcgcgatcagagactattgtttttggaataccatgtaaacgaataatttctctaaagaacaattcagcaacaatgctagcatcatcagttttatgacaaggtataaagtgagccattttagagaatctatcaacaaccacaaaaatactatccctccccttcttagttctaggcaagcccaaaacaaagtccatagagatatcaagccaaggagaagaagggacaggcaaaggcatatacaaaccatggttgttcaaccgtgacttagctttctgacaagtagtgcagcgtgcaacaaggcgctccacatcagcgcgcatccgaggccaaaagaagtgggcagccaacacctcatgtgtcttgtagacgccaaaatgccccatgagaccgcctccatgcgcttcctgtaacaacaaaagacgaaccgagctagctggaacacacagcttgttagcgcgaaacaggaacccatcctgtatgtgaaatttgccccatggttttccattaatacaatggccgaaagcatctttaaaatcagcatcgtcaacatattgatccttcacagtgtccaaaccaaagattttaaaatctaactgtgacagcatggtatagcgacgagacaaagcatcagcaataacattgtccttcccgttcttgtgtttaataatgtaaggaaaggactcaatgaattctacccatttagcatgacgacggttcagatttgtttgggtacgaatatgttttaaagcctcatgatcagaatggattatgaactcacgatgccaaagatagtgctgccatgtatgcaaagtgcgcactaaagcgtaaagctccttatcataagtagaatatttcagactagcaccgcttaatttttcactaaaataagcaactggttttccttcttgtaacaaaacagcacccagcccaataccactagcatcgcattcaagctcgaaaactttattaaaatcaggcaattgcaagaggggagcttgggttaacttatctttcaaagtgctgaacgctacctcctgcgaatcactccaggcaaacggcacatctttctttgtaagctcatgtagaggcgctgcaatggagctaaaatcacgaacaaatctgcggtagaaaccggcaagtccaagaaagctccgaatttgtgtgaccgtcgtcggtgtaggccactcccgaatggcagcaatcttgctgctatccacctcaatgccctgcggagtaaccacataaccaagaaacgagacacgttgcgtgcaaaatgtgcacttttccatgttaccaaacaagcgagcagcacgcaaagcgtcaaaaacagcacgcaaatgttctaaatgctcctctatagacttgctgtaaataaggatatcatcgaaataaacaacaacaaacaaacctatgaaggcccgtagaacttcgttcattaaacgcataaaggtgctgggagcattagtcaatccaaatggcataaccaaccattcatataaaccaaatttcgttttaaaagccgttttccattcatcaccgagtttcattctaatctgatggtaaccgctacgcaaatcaaccttagagaaaataacggcaccactaagctcatctagcatatcatcaaggcgtggaataggatatcgataacgaactgtgatgttattaatagcacgacaatctacgcacatacgccatgacccatctttctttggaacgagtaaaacgggaaccgagcaagggctaagagactcacgaatgtaacccttatcaagcagcgtctgcacctggcgctggatctccttcgtctcatctggatttgtacggtacggagcgcggttcggaagagaagtgccggggatgagatcgatctgatgctcaatgccacggaggggaggaagacccggtggtaagtccgtaggataaacatcagcatactcctgcaaaaggttaacaacagcagggggtatatccaaagacggtgcatcatcaagcggaacaagcattcgcgagcatacaagtgcataacagggcatatgagcttcatggagatcatcaaaatcagcacgtgtagcaagtaaaacaggagagtgcaacttgatttcagatttaataggtgcggctgatgtcgatttgacttgttgtgcagttttagcagccctagtaagatcatctttcaaaatttggtcaggggtcattggatgtataattattttctggcctttaaacatgaaagaataatgatttgaacgaccatgatgtaaactatcagtatcatattgccaaggtcgacccaataacaaagagcatgcttccataggaataacatcgcaatcaacataatcagaataagaacccagcgaaaaggggacacgtaccgaacgtgttacctttattttaccaccatcattaagccattgaatgtgatacggatgtggatgtgtgcgagtgggcaaggataatttctctaccaacgctgtacttgccaaattgttgcagctgccactatcgatgatgatgcgaatcgaccgttcgtgcacgacgcccttggtatggaatagagtgtgtcgctgatttttttcggcctgggcaacctgtgtgctgagaacacgctgcacaacaagactctcatacctatcagcgtcgatgggatcaacgtggacttcctcattttctgcatggttagtggcaatcatagcatgactagtttcctcagaatcactggctgaagagtactcaccattgtcacgtataagcaaggtacgcttgtttgggcagtcccgaatcatgtgcccaaaccctctgcaacgatggcactgaatatcccgtgtacgtcctgtggaagaagcggcgcctttggcagggggcgccactggcttggccggccctgtgcgcgatgtagtgctaggcgtaggaggtgcagggctggaaggagttgagctgtgtgttggaccccggcctgcaaaagagttagtatatgtctttgatcgtcgtccctgcacttcacgttcagctttgcaagcatattcaaacaatgtggttatatcaaaataatccttataatcaagtatatcctgaatttccctgttcaaaccaccacgaaaacgcgccatagcagcgtcatctgactcaaccaaaccacaacgaagcatacccttttgcaactcctggtaatattcctcaacagattgtgaaccttgttgaaaacgctgcattttgttaagcaaatcacgagcataataggaaggaacaaatctgtggcgcatggcagtttttaattgggtccaagtaatgacactgttaatgggaagtttttgtttatactcacgccaccaaattaaagcaaaatcagtaaattcactaatggcagccttcacttggctattagcaggaatatcatggcatgaaaatttctgttctacctctaattcccaatcaagatatgcagcaggatcatatttaccattaaaagatggaattttaaatttaatcttagaaaataagtcattagggggatgacgaaccacacgacgtgcacgaccacggcgatctccatcgtcctgctcagtgtcaccgccgtattcctgctccatctttgtggtcaatgcatcaaggcgtgccaggatggtgtcgagtgtggtgcgagtcgccgtttgagcaaggtcaagttggttgaaacgctcggtcgtcgaagtgatcgttgaatcaagccgttcatgcatcgtcctaatgtcagcagcaagtccatcaacttggccccttacttcctgcaactgggcatccaccatgtcgtgtgctcctgccatagttagcgcaaacaccaaaaggagaaaaaccaacgacaaaaacaggggtgtactgctcacaaggcgctcacactagtgctgttatcaagttcttatccgttcttaccaagccacagtggtgaactgcaaccaacaggtggaaccggtgaaagattggatgagcgattgcttggagaaacagaaacctgctcgtcgtagaaatatgtggagttgtgggtaggctgcactcaagtcaaggattagcacgatcaaacaataatgcaaagttgaattatagtgcaaaacacgaaactatattgctggccacaggtgcaaaggatggatggatggaaatagcagaatggcagtaacgtaaatattgtactagtgatgccaaaaaggcactagtacaaatcacaggtgattttgtttttcttttttgtatgatttttttgatatttttctcagcacaagaagcaacaagataggagctacacgaagtttcacctaaaacagatatcagatgtggtctacagaaaatcaggaagttctctgaaaagcgtgcgagaactttgacggatttttttctttattttcctgaatttttttgacaattttgtcgaaccccaaacagaccgtaggtgagtttggccgggctcagaatggtgtcaactagctcctgtaaaaatttcagattttttggacacccgagcgaaaagttatgcccggtttaaggaaggtacctcaaattatgttttcaaacgaccggaatgaaacaaccgtatcctttctccttcgttgttttttgtttctgtttttttttttacgtaaccgaaggagaaaaacaaggaaacgatgttgactcggtttgtttttttttctgtttttttttctgttttttttcgtaaccgaaggagaaaatcaaggaaaacagccgttgactcggtttgttttttctgtttttttttgacgtaaccgaaggagaaaaacaaggaaacaatgttgactcggtttgtggtgtgatcaaacgagagatggtggcggcgctagggtttgaatggtggaagaacacaatgcaaccagcaacaaatgacgcgaaagcacacaaattcaacaatgcagattattgaaagaaagtgcgaggctcaaaagggtgctgggataagatctaacctgaatttttatgtggttttgtggactgtaggaaaaaaaaacgctcgataaactcaccgatcaacctagaaatctgataccaattgatgaagctgaggtgcccgatctttcggcgagtagagataattccgatttggcggaagatgacccttgcgatccgactacgacgagcaagcccgaggcgccaatgcaatcgctgaaccaactccctgtggttaccgaccttgctgatgcgagatcggcctgatcacgaagatcgtttcctgtgcgcaatcgaagaacgaacaagaataagatgcgagcaatctaatctattactcgagggtggagttctgaatacacgaagacagcgcagattagcgcgtgttcgagagtagctaaggctaacgtaaaacaaaactcaggaaataaaggaggcgcagctcctgaataaatagagagggggcgcagcccctaggggcggccaaccctaggtcgtccattatgggccgcaattgggctggtcgtctattcttccgggccttcgttctttaacaacatgatgtagttcaattctcttgcacgggcccgagtcactggcccaggtggaaggggtggcgcctgggctggagaaggtgctgctggtgtagatgtgctcgtgttggtgttgatgtccgcatcaa

SEQ ID NO: 4 - DNA, 7572 bp, Zea mays
  source: /note="CRM2"
tgatgaagacatccacactactgatgcatctataccaatacaagtaccaatttctggtcccattactcgcgctcgtgctcgtcaactcaaccatcaggtgattacactcttgagttcatgtccatcatatttagaccatggagacccgtgcactcttgttttgcttaggaatcagggagaagaccgaaagggaaaaggatttgaacatgctggattcggactgcagaagaacaccaacttgtgacggtcaccacggtcagatgcgggctcggattggaatgttcaagcacaacatggaaagcttatcaagtctactttcatatggatccggaattatagtcatatctgttctgaggccgccgtaatcattgttttcttaccgagacatttcctgccttttctgcccatggtgctgcgtcaccctattttggcccaatgggtcgtgtatcaagttaggtccattagggacgcatcctagggttgcagcacgaccccaatacccttgtggtcgtcctcccatgtttataaaccccctagccgccaccaagaacagcgggttttgtttagatcaagtttagctctcgctacttgcttgcaagcgcgcgtgctagttcagccgcccgtcttcttgtcttcggaaccccaccatattggagtttgatctttaaacctacatttagatctggtaattcagtacttgttctacttgttcttgctagttcttcgattgcttgcaggacgagtgccctagtggccagggtgtcacgctccacaagatcgtgacagccataggaggtggtgtatcggttgctaaggcgcagcgtctttggaaggctgtagtcgggccgtgaacgtcgtctcctcccccaatcgagttattccacaccctctcatcgaaagatcgggcaatcacccaacgggtgcacatcagttggtaatcagagcaaggtttatcggtgagagatttacttttcttcgctgttttcttatctcctatagtccagaaaaagccaaaaaaatagtagattagttttaccgcaatcctataaaccattgagcatttactagtactacttagttagggcttgttgagtttttggttgcatcggttgtgtcgagttgctggtcttagtttattcctttagagttttgagttctaccacgttttggtcaccacgagatccaccatcaccaaaaacatctctggttcgtttttgccaccacggatacatatcatatccgatttggaagtttaaatacaatctggaaagcttatcttatcttctttccaacggatctgaccttatctcaaaattcgttctgagcgctccgcaatcatcgtagagatttctggactttctatattaacaagatttgttaaatctgatttaaaggggttgttagcaatatctttattgtttgggttgtcatagtgaaaaaaagggtttaggcccctgcaaaaaaaaacagaagaagaagaaaaaaaaagaatagaaaagaaaaaaaaggaaaagaagaagaagggggctgaatctctaaatctgttgtttctctttgtgctgtgctagttgttctttttcagtgactacctttgtgcctaggctcacgtctctagcctggtttagcctaggaccagcacagtaccaccgttgaacgattattcagcttgcttttgtaactaacgtggtactagtgtattccttgcttcagcccacctacaactctacatatttcgactacagtttgacaggtcgtgttgctgcggcaccgatacacttattccacggttgcagacttgttggttgctgacccctcctgttgtgcaaggtaagaattggtaagagcttgtgtggcaggttgagagtgagcgccttgcagtagctacatcctaatagttgtagagtttttattccttcacatttttttttcttgttgcctctgttcgtctaaccatggcaggattggaggttgatgatgcttctcgtaatatgccacactctcctcgcaccaagggtatcatacaacactttgtaaggctggtgaaaacgcacacggaaggtcttgataatgacatgcaggtgacgaatgaaaagatggggcaattggaggccacacagatcgacacaaacaccaaacttgcaaatgtggaaatgacagttgctcatattgacaagagccttgtcgcactcttgaggcgatttgatgagatgcatgctaataccaatggtgggcgtgatgagggcgccgaaggtaactgggatgactatgttgctgatactgaacaagatgaccaagaagcacctaatcgccggcgactacgtactaaccgtagaggtatgggtggttttcaccgacgtgaggtacatggtaatgatgatgcttttagtaaggttaaatttaaaatacctccttttgatggtaaatatgaccctgatgcttacattacttgggagattgcggttgatcaaaagtttgcatgccatgaatttcctgagaatgcgcgggttagagctgctactagtgagtttactgaatttgcttctgtttggtggatagaacatggtaagaagaatcctaataacatgccacaaacttgggatgcgttgaaacgggtcatgcgggctagatttgttccttcttattatgcacgtgatatgttaaacaagttgcaacaattgagacagggtactaaaagtgtagaagaatattatcaggaattacaaatgggtatgctgcgttgtaacatagaggagggtgaggaatctgctatggctagatttttgggcgggttaaatagggaaattcaggacatccttgcttataaagattatgctaatgtaacccgattgtttcatcttgcttgcaaagctgaaagggaagtgcagggacgacgtgctagtgcaaggtctaatgtttctgcaggaaaatctacaccatggcaacagcgcacgactacgtccatgaccggccgtacactagcaccaactccctcgccaagtcgaccagcacccccgccttcctccagcgacaaaccacgtgcatcttccacaaattcagcaaccaaatctgcccagaaaccagcaggtagtgcctcttcagtagcctccacgggtagaacaagagatgttctgtgttatcgatgcaagggctatggacacgtgcagcgtgattgtcctaatcagcgtgttttggtggtaaaagacgatggtgggtattcctctgctagtgatttggatgaagctacacttgctttgcttgcggctgatgatgcaggcactaaggaaccacccgaagaacagattggtgcagatgatgcagagcattatgagagcctcattgtacagcgtgtgcttagtgcacaaatggagaaggcagagcagaatcagcgacatacgttgtttcaaacaaagtgtgtcattaaggagcgttcatgtcgtttgatcattgatggaggtagctgcaacaacttggctagcagcgacatggtggagaagcttgcacttacgaccaaaccgcacccgcatccatatcacattcaatggctcaacaatagtggtaaggtcaaggtaaccaagctggtacgaattaattttgctattggttcatatcgtgatgttgttgactgtgatgttgtgcctatggatgcttgtaatattctgctaggtagaccatggcaatttgattcagattgtatgcatcatggtagatcaaatcaatattctctcatacaccatgataagaaaattattttgcttcccatgtcccctgaggctattgtgcgtgatgatgttgctaaagctaccaaagctaaaactgagaacaacaagaatattaaagttgttggtaataacaaagatgggataaaattgaaaggacattgcttgcttgcaacaaaaactgatgttaatgaattatttgcttccactactgttgcctacgccttggtatgcaaggatgctttgatttcaattcaagatatgcagcattctttgcctcctgttattactaacattttgcaggagtattctgatgtatttccaagtgagataccagaggggctgccacctatacgagggattgagcaccaaattgatcttattcctggtgcatctttgccgaatcgtgcgccatataggacaaatccagaggaaacaaaagaaattcagcgacaagtgcaagaactactcgacaaaggttacgtgcgtgagtctcttagtccgtgtgctgttccggttattttagtgcctaaaaaagatggaacatggcgtatgtgtgttgattgtagggctattaataatatcacgatacgttatcgacaccctattccacgtttagatgatatgcttgatgaattgagtggtgccattgtcttttctaaagttgatttgcgtagtgggtaccaccagattcgtatgaaattgggagatgaatggaaaactgctttcaaaactaagttcggattgtatgagtggttagtcatgccttttgggttaactaatgcacctagcactttcatgagattaatgaacgaggttttgcgtgccttcattggaaaatttgtggtagtatactttgatgacatattaatctacagcaaatctatggatgaacatgttgatcacatgcgtgctgtttttaatgctttacgagatgcacgtttatttggtaaccttgagaagtgcacattttgcaccgatcgagtttcgtttcttggttatgttgtgactccacagggaattgaggttgatcaagccaaggtagaagcgatacatggatggcctatgccaaagactatcacacaggtgcggagtttcctaggacttgctggcttctatcgccgttttgtgaaggactttagcaccattgctgcacctttgaatgagcttacgaagaagggagtgcattttagttggggcaaagtacaagagcacgctttcaacgtgctgaaagataagttgacacatgcacctctcctccaacttcctgattttaataagacttttgagcttgaatgtgatgctagtggaattggattgggtggtgttttgttacaagaaggcaaacctgttgcatattttagtgaaaaattgagtgggtctgttctaaattattctacttatgataaggaattatatgctcttgtgcgaacattagaaacatggcagcattatttgtggcccaaagagtttgttattcattctgatcatgaatctttgaaacatattcgtagtcaaggaaaactgaaccgtagacatgctaagtgggttgaatttatcgaatcgtttccttatgttattaagcacaagaaaggaaaagagaatatcattgctgacgctttgtctaggagatatactttgctgaatcaacttgactacaaaatctttggattagagacgattaaagaccaatatgttcatgatgctgattttaaagatgtgttgctgcattgtaaagatgggaaaggatggaacaaatatatcgttagtgatgggtttgtgtttagagctaacaagctatgcattccagctagctccgttcgtttgttgttgttacaggaagcacatggaggtggcttaatgggacattttggagcaaagaaaacggaggacatacttgctggtcatttcttttggcccaagatgagaagagatgtggtgagattggttgctcgttgcacgacatgccaaaaggcgaagtcacggttaaatccacacggtttgtatttgcctctacccgttcctagtgctccttgggaagatatttctatggattttgtgctgggattgcctaggactaggaagggacgtgatagtgtgtttgtggttgttgatagattttctaagatggcacatttcataccatgtcataaaactgacgatgctactcatattgctgatttgttctttcgtgaaattgttcgcttgcatggtgtgcccaacacaatcgtttctgatcgtgatgctaaatttcttagtcatttttggaggactttgtgggcaaaattggggactaagcttttattttctactacatgtcatcctcaaactgatggtcaaactgaagttgtgaatagaactttgtctactatgttaagggcagttctaaagaagaatattaagatgtgggaggactgtttgcctcatattgaatttgcttataatcgatcattgcattctactacaaagatgtgcccatttcagattgtatatggtttgttacctcgtgctcctattgatttaatgcctttgccatcttctgaaaaactaaattttgatgctactaggcgtgctgaattgatgttaaaactgcacgaaactactaaagaaaacatagagcgtatgaatgctagatataagtttgctagtgataaaggtagaaaggaaataaattttgaacctggagatttagtttggttgcatttgagaaaggaaaggtttcctgaattacgaaaatctaaattgttgcctcgagccgatggaccgtttaaagtgctagagaaaattaacgacaatgcatataggctagatctgcctgcagactttggggttagccccacatttaacattgcagatttaaagccctacttgggagaggaagttgagcttgagtcgaggacgactcaaatgcaagaaggggagaatgatgaagacatccacactactgatgcatctataccaatacaagtaccaatttctggtcccattactcgcgctcgtgctcgtcaactcaaccatcaggtgattacactcttgagttcatgtccatcatatttagagccatggagacccgtgcactcttgttttgcttaggaatcagggagaagaccgaaagggaaaaggatttgaacatgctggattcggactgcagaagaacaccaacttgtgacggtcaccacggtcagatgcgggctcggattggaatgttcaagcacaacatggaaagcttatcaagtctactttcatatggatccggaattatagtcatatctgttctgaggccgccgtaatcattgttttcttaccgagacatttcctgccttttctgcccatggtgctgcgtcaccctattttggcccaatgggtcgtgtatcaagttaggtccattagggacgcatcctagggttgcagcacgaccccaatacccttgtggtcgtcctcccatgtttataaaccccctagccgccaccaagaacagcgggttttgtttagatcaagtttagctctcgctacttgcttgtaagcgcgcgtgctagttcagccgcccgtcttcttgtcttcggaaccccaccatattggagtttgattttgaaacctacatttagatctggtaattcagtacttgttctacttgttcttgctagttcttcgattgcttgcaggacgagtgccctagtggccagggtgtcacgctccacaagatcgtgacagccataggaggtggtgtatcggttgctaaggcgcagcgtctttggaaggctgtagtcgggccgtgaacgtcgtctcctcccccaatcgagttattccacaccctctcatcgaaagatcgggcaatcacccaacgggtgcacatcag

SEQ ID NO: 5 - DNA, 32 bp, Artificial Sequence
  source: /note="Description of Artificial Sequence: Synthetic primer"
agggtttagggtttagggtttagggtttaggg

SEQ ID NO: 6 - DNA, 30 bp, Artificial Sequence
  source: /note="Description of Artificial Sequence: Synthetic primer"
ccctaaaccctaaaccctaaaccctaaacc

SEQ ID NO: 7 - DNA, 24 bp, Artificial Sequence
  source: /note="Description of Artificial Sequence: Synthetic primer"
ggttccggtggcaaaaactcgtgc

SEQ ID NO: 8 - DNA, 24 bp, Artificial Sequence
  source: /note="Description of Artificial Sequence: Synthetic primer"
tgtcggtgcatacaaagcacgagt

SEQ ID NO: 9 - DNA, 24 bp, Artificial Sequence
  source: /note="Description of Artificial Sequence: Synthetic primer"
gaatgggtgacgtgcgacaacgaa

SEQ ID NO: 10 - DNA, 24 bp, Artificial Sequence
  source: /note="Description of Artificial Sequence: Synthetic primer"
ggtggtttctcgcaatttcgttgt

SEQ ID NO: 11 - DNA, 24 bp, Artificial Sequence
  source: /note="Description of Artificial Sequence: Synthetic primer"
gttttggacctaaagtagtggatt

SEQ ID NO: 12 - DNA, 24 bp, Artificial Sequence
  source: /note="Description of Artificial Sequence: Synthetic primer"
cacaacgaacatgcccaatccact

SEQ ID NO: 13 - DNA, 24 bp, Artificial Sequence
  source: /note="Description of Artificial Sequence: Synthetic primer"
cttggtcttggacagtacctcact

SEQ ID NO: 14 - DNA, 24 bp, Artificial Sequence
  source: /note="Description of Artificial Sequence: Synthetic primer"
cccttgcgatccgactacgacgag

SEQ ID NO: 15 - DNA, 24 bp, Artificial Sequence
  source: /note="Description of Artificial Sequence: Synthetic primer"
tcacgaagatcgtttcctgtgcgc

SEQ ID NO: 16 - DNA, 24 bp, Artificial Sequence
  source: /note="Description of Artificial Sequence: Synthetic primer"
cagcgcagattagcgcgtgttcga

SEQ ID NO: 17 - DNA, 24 bp, Artificial Sequence
  source: /note="Description of Artificial Sequence: Synthetic primer"
ccaaccctaggtcgtccattatgg

SEQ ID NO: 18 - DNA, 24 bp, Artificial Sequence
  source: /note="Description of Artificial Sequence: Synthetic primer"
ttcaattctcttgcacgggcccga

SEQ ID NO: 19 - DNA, 24 bp, Artificial Sequence
  source: /note="Description of Artificial Sequence: Synthetic primer"
tcaggtctacttcatcagtgaggt

SEQ ID NO: 20 - DNA, 24 bp, Artificial Sequence
  source: /note="Description of Artificial Sequence: Synthetic primer"
tggcgcctcgggcttgctcgtcgt

SEQ ID NO: 21 - DNA, 24 bp, Artificial Sequence
  source: /note="Description of Artificial Sequence: Synthetic primer"
tgttcgttcttcgattgcgcacag

SEQ ID NO: 22 - DNA, 24 bp, Artificial Sequence
  source: /note="Description of Artificial Sequence: Synthetic primer"
ttagccttagctactctcgaacac

SEQ ID NO: 23 - DNA, 24 bp, Artificial Sequence
  source: /note="Description of Artificial Sequence: Synthetic primer"
ccagcccaattgcggcccataatg

SEQ ID NO: 24 - DNA, 24 bp, Artificial Sequence
  source: /note="Description of Artificial Sequence: Synthetic primer"
cacctgggccagtgactcgggccc

SEQ ID NO: 25 - DNA, 24 bp, Artificial Sequence
  source: /note="Description of Artificial Sequence: Synthetic primer"
tgatgaagacatccacactactga

SEQ ID NO: 26 - DNA, 24 bp, Artificial Sequence
  source: /note="Description of Artificial Sequence: Synthetic primer"
ttgaacatgctggattcggactgc

SEQ ID NO: 27 - DNA, 24 bp, Artificial Sequence
  source: /note="Description of Artificial Sequence: Synthetic primer"
ctgcccatggtgctgcgtcaccct

SEQ ID NO: 28 - DNA, 24 bp, Artificial Sequence
  source: /note="Description of Artificial Sequence: Synthetic primer"
gcgcgtgctagttcagccgcccgt

SEQ ID NO: 29 - DNA, 24 bp, Artificial Sequence
  source: /note="Description of Artificial Sequence: Synthetic primer"
gtatcggttgctaaggcgcagcgt

SEQ ID NO: 30 - DNA, 24 bp, Artificial Sequence
  source: /note="Description of Artificial Sequence: Synthetic primer"
tattggtatagatgcatcagtagt

SEQ ID NO: 31 - DNA, 24 bp, Artificial Sequence
  source: /note="Description of Artificial Sequence: Synthetic primer"
aagttggtgttcttctgcagtccg

SEQ ID NO: 32 - DNA, 25 bp, Artificial Sequence
  source: /note="Description of Artificial Sequence: Synthetic primer"
cccattgggccaaaatagggtgacg

SEQ ID NO: 33 - DNA, 24 bp, Artificial Sequence
  source: /note="Description of Artificial Sequence: Synthetic primer"
ttccgaagacaagaagacgggcgg

SEQ ID NO: 34 - DNA, 24 bp, Artificial Sequence
  source: /note="Description of Artificial Sequence: Synthetic primer"
ctacagccttccaaagacgctgcg

SEQ ID NO: 35 - DNA, 24 bp, Artificial Sequence
  source: /note="Description of Artificial Sequence: Synthetic primer"
tgatgagaacataacccgcacaga

SEQ ID NO: 36 - DNA, 24 bp, Artificial Sequence
  source: /note="Description of Artificial Sequence: Synthetic primer"
aggatgatgaggacatcactgcca

SEQ ID NO: 37 - DNA, 24 bp, Artificial Sequence
  source: /note="Description of Artificial Sequence: Synthetic primer"
aaccatctagaatttgagaaggca

SEQ ID NO: 38 - DNA, 24 bp, Artificial Sequence
  source: /note="Description of Artificial Sequence: Synthetic primer"
gtccagaaactgccgagtgaactc

SEQ ID NO: 39 - DNA, 24 bp, Artificial Sequence
  source: /note="Description of Artificial Sequence: Synthetic primer"
gagagagtttcgttctccattaga

SEQ ID NO: 40 - DNA, 24 bp, Artificial Sequence
  source: /note="Description of Artificial Sequence: Synthetic primer"
gttcttgcttgttctcgattgctt

SEQ ID NO: 41 - DNA, 24 bp, Artificial Sequence
  source: /note="Description of Artificial Sequence: Synthetic primer"
ttggttgtggtagtcgggcagcca

SEQ ID NO: 42 - DNA, 24 bp, Artificial Sequence
  source: /note="Description of Artificial Sequence: Synthetic primer"
cattaacatggtcatatctgtgcg

SEQ ID NO: 43 - DNA, 24 bp, Artificial Sequence
  source: /note="Description of Artificial Sequence: Synthetic primer"
tggtgtggtgtattgatggcagtg

SEQ ID NO: 44 - DNA, 23 bp, Artificial Sequence
  source: /note="Description of Artificial Sequence: Synthetic primer"
cttttattgccttgttgccttct

SEQ ID NO: 45 - DNA, 24 bp, Artificial Sequence
  source: /note="Description of Artificial Sequence: Synthetic primer"
gacttgggtagagcaggagttcac

SEQ ID NO: 46 - DNA, 24 bp, Artificial Sequence
  source: /note="Description of Artificial Sequence: Synthetic primer"
aggaatagaaaggagttctaatgg

SEQ ID NO: 47 - DNA, 24 bp, Artificial Sequence
  source: /note="Description of Artificial Sequence: Synthetic primer"
acagccttgaacctgcaagcaatc

SEQ ID NO: 48 - DNA, 24 bp, Artificial Sequence
  source: /note="Description of Artificial Sequence: Synthetic primer"
tgttggagaacgacgttggctgcc

SEQ ID NO: 49 - DNA, 24 bp, Artificial Sequence
  source: /note="Description of Artificial Sequence: Synthetic primer"
taagtgcaaaccattgttaaattt

SEQ ID NO: 50 - DNA, 24 bp, Artificial Sequence
  source: /note="Description of Artificial Sequence: Synthetic primer"
cacaaacccttaactcgaaactat

SEQ ID NO: 51 - DNA, 24 bp, Artificial Sequence
  source: /note="Description of Artificial Sequence: Synthetic primer"
atcgaaagataactcatatggctt

SEQ ID NO: 52 - DNA, 24 bp, Artificial Sequence
  source: /note="Description of Artificial Sequence: Synthetic primer"
tccactaaagaaccaagattgtga

SEQ ID NO: 53 - DNA, 24 bp, Artificial Sequence
  source: /note="Description of Artificial Sequence: Synthetic primer"
aattgtactatctctaaaatttaa

SEQ ID NO: 54 - DNA, 24 bp, Artificial Sequence
  source: /note="Description of Artificial Sequence: Synthetic primer"
tttagggtttggggttatagtttc

SEQ ID NO: 55 - DNA, 24 bp, Artificial Sequence
  source: /note="Description of Artificial Sequence: Synthetic primer"
gaccataatggtcaaaaagccata

SEQ ID NO: 56 - DNA, 24 bp, Artificial Sequence
  source: /note="Description of Artificial Sequence: Synthetic primer"
atatgttggacacaaatcacaatc

SEQ ID NO: 57 - DNA, 24 bp, Artificial Sequence
  source: /note="Description of Artificial Sequence: Synthetic primer"
ccggaaataagcaaagtccaagcg

SEQ ID NO: 58 - DNA, 24 bp, Artificial Sequence
  source: /note="Description of Artificial Sequence: Synthetic primer"
tatgtcttgggtgaagggcatggc

SEQ ID NO: 59 - DNA, 24 bp, Artificial Sequence
  source: /note="Description of Artificial Sequence: Synthetic primer"
cgcaaggcgacgggcggcatggct

SEQ ID NO: 60 - DNA, 24 bp, Artificial Sequence
  source: /note="Description of Artificial Sequence: Synthetic primer"
cgaggggttccccatggcgcacgg

SEQ ID NO: 61 - DNA, 24 bp, Artificial Sequence
  source: /note="Description of Artificial Sequence: Synthetic primer"
tcggtgtctttccacacgcttgga

SEQ ID NO: 62 - DNA, 24 bp, Artificial Sequence
  source: /note="Description of Artificial Sequence: Synthetic primer"
gttttccctccgttccgccatgcc

SEQ ID NO: 63 - DNA, 24 bp, Artificial Sequence
  source: /note="Description of Artificial Sequence: Synthetic primer"
agacgcaaggccgaacagccatgc

SEQ ID NO: 64 - DNA, 24 bp, Artificial Sequence
  source: /note="Description of Artificial Sequence: Synthetic primer"
ggcctcagttttcggcccgtgcgc

SEQ ID NO: 65 - DNA, 24 bp, Artificial Sequence
  source: /note="Description of Artificial Sequence: Synthetic primer"
gacacatgtttttgtcgtcgaaca

SEQ ID NO: 66 - DNA, 24 bp, Artificial Sequence
  source: /note="Description of Artificial Sequence: Synthetic primer"
ggaggcacgaaatcgctgttcgac

SEQ ID NO: 67 - DNA, 24 bp, Artificial Sequence
  source: /note="Description of Artificial Sequence: Synthetic primer"
cgaccgccacccatgatttgacca

SEQ ID NO: 68 - DNA, 24 bp, Artificial Sequence
  source: /note="Description of Artificial Sequence: Synthetic primer"
accttaccagtctctatggtcaaa

SEQ ID NO: 69 - DNA, 24 bp, Artificial Sequence
  source: /note="Description of Artificial Sequence: Synthetic primer"
tcccgtgagctatagcacacgttt

SEQ ID NO: 70 - DNA, 24 bp, Artificial Sequence
  source: /note="Description of Artificial Sequence: Synthetic primer"
acacgttttcatggccgagcgacc

SEQ ID NO: 71 - DNA, 24 bp, Artificial Sequence
  source: /note="Description of Artificial Sequence: Synthetic primer"
ccgtgttcctccacacgtgttttt

SEQ ID NO: 72 - DNA, 24 bp, Artificial Sequence
  source: /note="Description of Artificial Sequence: Synthetic primer"
aaggtgctccggggacaaaaacac

SEQ ID NO: 73 - DNA, 24 bp, Artificial Sequence
  source: /note="Description of Artificial Sequence: Synthetic primer"
ttggcctcccgcgagctatatcac

SEQ ID NO: 74 - DNA, 24 bp, Artificial Sequence
  source: /note="Description of Artificial Sequence: Synthetic primer"
ttggccacggaaatgtgtgatata

SEQ ID NO: 75 - DNA, 24 bp, Artificial Sequence
  source: /note="Description of Artificial Sequence: Synthetic primer"
ttatgtatccgacctgccaccttc

SEQ ID NO: 76 - DNA, 24 bp, Artificial Sequence
  source: /note="Description of Artificial Sequence: Synthetic primer"
ctccccggtctaaaacgaaggtgg

SEQ ID NO: 77 - DNA, 24 bp, Artificial Sequence
  source: /note="Description of Artificial Sequence: Synthetic primer"
gccacccgtgagctatagcacacg

SEQ ID NO: 78 - DNA, 24 bp, Artificial Sequence
  source: /note="Description of Artificial Sequence: Synthetic primer"
taggtttccataaaatcgtgtgct

SEQ ID NO: 79 - DNA, 24 bp, Artificial Sequence
  source: /note="Description of Artificial Sequence: Synthetic primer"
tgtcgaaaatagccatgaacgacc

SEQ ID NO: 80 - DNA, 24 bp, Artificial Sequence
  source: /note="Description of Artificial Sequence: Synthetic primer"
cggtattattggaaatggtcgttc

SEQ ID NO: 81 - DNA, 24 bp, Artificial Sequence
  source: /note="Description of Artificial Sequence: Synthetic primer"
cctacggatttttgaccaagaaat

SEQ ID NO: 82 - DNA, 24 bp, Artificial Sequence
  source: /note="Description of Artificial Sequence: Synthetic primer"
atttctagtggagaccatttcttg

SEQ ID NO: 83 - DNA, 24 bp, Artificial Sequence
  source: /note="Description of Artificial Sequence: Synthetic primer"
atgtggggtgaggtgtatgagcct

SEQ ID NO: 84 - DNA, 24 bp, Artificial Sequence
  source: /note="Description of Artificial Sequence: Synthetic primer"
atgagcctctggtcgatgatcaat

SEQ ID NO: 85 - DNA, 24 bp, Artificial Sequence
  source: /note="Description of Artificial Sequence: Synthetic primer"
ggatgcgatcataccagcactaaa

SEQ ID NO: 86 - DNA, 24 bp, Artificial Sequence
  source: /note="Description of Artificial Sequence: Synthetic primer"
tgatgggatccggtgctttagtgc

SEQ ID NO: 87 - DNA, 24 bp, Artificial Sequence
  source: /note="Description of Artificial Sequence: Synthetic primer"
cttgggcgagagtagtactaggat

SEQ ID NO: 88 - DNA, 24 bp, Artificial Sequence
  source: /note="Description of Artificial Sequence: Synthetic primer"
tcccaggaggtcacccatcctagt

SEQ ID NO: 89 - DNA, 24 bp, Artificial Sequence
  source: /note="Description of Artificial Sequence: Synthetic primer"
accatagtaaaaatgggtgaccgt

SEQ ID NO: 90 - DNA, 23 bp, Artificial Sequence
  source: /note="Description of Artificial Sequence: Synthetic primer"
taatttaacacgagaacggtcac

SEQ ID NO: 91 - DNA, 24 bp, Artificial Sequence
  source: /note="Description of Artificial Sequence: Synthetic primer"
ccgtgggcgagccgagcacggagg

SEQ ID NO: 92 - DNA, 24 bp, Artificial Sequence
  source: /note="Description of Artificial Sequence: Synthetic primer"
tcctcttatgcccacacctccgtg

SEQ ID NO: 93 - DNA, 24 bp, Artificial Sequence
  source: /note="Description of Artificial Sequence: Synthetic primer"
ctcaaatgacgtttctatgatatt

SEQ ID NO: 94 - DNA, 24 bp, Artificial Sequence
  source: /note="Description of Artificial Sequence: Synthetic primer"
tgaatacaatgccctcaatatcat

SEQ ID NO: 95 - DNA, 24 bp, Artificial Sequence
  source: /note="Description of Artificial Sequence: Synthetic primer"
ctaggtttcctataatcccctcta

SEQ ID NO: 96 - DNA, 23 bp, Artificial Sequence
  source: /note="Description of Artificial Sequence: Synthetic primer"
ctaggtatgccttgaatagaggg

SEQ ID NO: 97 - DNA, 24 bp, Artificial Sequence
  source: /note="Description of Artificial Sequence: Synthetic primer"
atgttgtttatgtccactcaagta

SEQ ID NO: 98 - DNA, 24 bp, Artificial Sequence
  source: /note="Description of Artificial Sequence: Synthetic primer"
atggtgtacggtgttttacttgag

SEQ ID NO: 99 - DNA, 24 bp, Artificial Sequence
  source: /note="Description of Artificial Sequence: Synthetic primer"
gtgagatctgtccaaacataggtt

SEQ ID NO: 100 - DNA, 24 bp, Artificial Sequence
  source: /note="Description of Artificial Sequence: Synthetic primer"
ggtgccttacaaccgtaacctatg

SEQ ID NO: 101 - DNA, 40 bp, Artificial Sequence
  source: /note="Description of Artificial Sequence: Synthetic primer"
gcaaactttatgtgatcccttcctcgctgaacgagatgag

SEQ ID NO: 102 - DNA, 40 bp, Artificial Sequence
  source: /note="Description of Artificial Sequence: Synthetic primer"
gggacggcaagtcacggtaagaccagtccaaccgaatgat

SEQ ID NO: 103 - DNA, 40 bp, Artificial Sequence
  source: /note="Description of Artificial Sequence: Synthetic primer"
ccaaacttgctgagattactgggcaatctgttcgctcgca

SEQ ID NO: 104 - DNA, 24 bp, Artificial Sequence
  source: /note="Description of Artificial Sequence: Synthetic probe primer"
ccaggtagtttgaaacagtattct

SEQ ID NO: 105 - DNA, 24 bp, Artificial Sequence
  source: /note="Description of Artificial Sequence: Synthetic probe primer"
ataaaggaaaagggcaaaccaaac

SEQ ID NO: 106 - DNA, 24 bp, Artificial Sequence
  source: /note="Description of Artificial Sequence: Synthetic probe primer"
gatgcccacattatagtgattagc

SEQ ID NO: 107 - DNA, 24 bp, Artificial Sequence
  source: /note="Description of Artificial Sequence: Synthetic probe primer"
ccacatatagctgctgcatatgcc

SEQ ID NO: 108 - DNA, 24 bp, Artificial Sequence
  source: /note="Description of Artificial Sequence: Synthetic probe primer"
cggatctaacacaaacatgaacag

SEQ ID NO: 109 - DNA, 24 bp, Artificial Sequence
  source: /note="Description of Artificial Sequence: Synthetic probe primer"
cgatgaattttctcgggtgttctc

SEQ ID NO: 110 - DNA, 24 bp, Artificial Sequence
  source: /note="Description of Artificial Sequence: Synthetic probe primer"
cctgcagccctaataattcagaag

SEQ ID NO: 111 - DNA, 24 bp, Artificial Sequence
  source: /note="Description of Artificial Sequence: Synthetic probe primer"
cacagtcgatgaatccagaaaagc

SEQ ID NO: 112 - DNA, 24 bp, Artificial Sequence
  source: /note="Description of Artificial Sequence: Synthetic probe primer"
gcgtgcaatccatcttgttcaatc

SEQ ID NO: 113 - DNA, 24 bp, Artificial Sequence
  source: /note="Description of Artificial Sequence: Synthetic probe primer"
caaccacaccacatcatcacaacc

SEQ ID NO: 114 - DNA, 24 bp, Artificial Sequence
  source: /note="Description of Artificial Sequence: Synthetic probe primer"
actggcaagttagcaatcagaacg

SEQ ID NO: 115 - DNA, 24 bp, Artificial Sequence
  source: /note="Description of Artificial Sequence: Synthetic probe primer"
catgaacgtgtcttcaactagagg

SEQ ID NO: 116 - DNA, 24 bp, Artificial Sequence
  source: /note="Description of Artificial Sequence: Synthetic probe primer"
gacggcgtttaacaggctggcatt

SEQ ID NO: 117 - DNA, 24 bp, Artificial Sequence
  source: /note="Description of Artificial Sequence: Synthetic probe primer"
ccaagctcttcagcaatatcacgg

SEQ ID NO: 118 - DNA, 24 bp, Artificial Sequence
  source: /note="Description of Artificial Sequence: Synthetic probe primer"
atactttctcggcaggagcaaggt

SEQ ID NO: 119 - DNA, 24 bp, Artificial Sequence
  source: /note="Description of Artificial Sequence: Synthetic probe primer"
atccttggcggcaagaaagccatc

SEQ ID NO: 120 - DNA, 24 bp, Artificial Sequence
  source: /note="Description of Artificial Sequence: Synthetic probe primer"
gcaagctacctgctttctctttgc

SEQ ID NO: 121 - DNA, 24 bp, Artificial Sequence
  source: /note="Description of Artificial Sequence: Synthetic probe primer"
gcttcttggccatgtagatggact

SEQ ID NO: 122 - DNA, 24 bp, Artificial Sequence
  source: /note="Description of Artificial Sequence: Synthetic probe primer"
ttcacgccgatgaacttcaccttg

SEQ ID NO: 123 - DNA, 24 bp, Artificial Sequence
  source: /note="Description of Artificial Sequence: Synthetic probe primer"
aagcttgccaacgactacgcacta

SEQ ID NO: 124 - DNA, 24 bp, Artificial Sequence
  source: /note="Description of Artificial Sequence: Synthetic probe primer"
ccctgatgctcttcgtccagatca

SEQ ID NO: 125 - DNA, 24 bp, Artificial Sequence
  source: /note="Description of Artificial Sequence: Synthetic probe primer"
agagcagccgattgtctgttgtgc

SEQ ID NO: 126 - DNA, 24 bp, Artificial Sequence
  source: /note="Description of Artificial Sequence: Synthetic probe primer"
caggatcccgtaactataacggtc

SEQ ID NO: 127 - DNA, 24 bp, Artificial Sequence
  source: /note="Description of Artificial Sequence: Synthetic probe primer"
cgacctgcagaagtaacaccaaac

SEQ ID NO: 128 - DNA, 24 bp, Artificial Sequence
  source: /note="Description of Artificial Sequence: Synthetic probe primer"
atctagaacgaccgcccaaccaga

SEQ ID NO: 129 - DNA, 24 bp, Artificial Sequence
  source: /note="Description of Artificial Sequence: Synthetic probe primer"
atttgggggagatctggttgtgtg

SEQ ID NO: 130 - DNA, 24 bp, Artificial Sequence
  source: /note="Description of Artificial Sequence: Synthetic probe primer"
gagggggtgtctatttattacggc

SEQ ID NO: 131 - DNA, 24 bp, Artificial Sequence
  source: /note="Description of Artificial Sequence: Synthetic probe primer"
catgcaagctgatctgagcttggc

SEQ ID NO: 132 - DNA, 24 bp, Artificial Sequence
  source: /note="Description of Artificial Sequence: Synthetic probe primer"
tccatgcgcaccttgaagcgcatg

SEQ ID NO: 133 - DNA, 24 bp, Artificial Sequence
  source: /note="Description of Artificial Sequence: Synthetic probe primer"
ttccatccgagtacgtgctcgctc

SEQ ID NO: 134 - DNA, 24 bp, Artificial Sequence
  source: /note="Description of Artificial Sequence: Synthetic probe primer"
atccactagtaacggccgccagtg

SEQ ID NO: 135 - DNA, 24 bp, Artificial Sequence
  source: /note="Description of Artificial Sequence: Synthetic probe primer"
gccacgcaatttctggatgccgac

SEQ ID NO: 136 - DNA, 24 bp, Artificial Sequence
  source: /note="Description of Artificial Sequence: Synthetic probe primer"
cgatagccgcgctgcctcgtcttg

SEQ ID NO: 137 - DNA, 24 bp, Artificial Sequence
  source: /note="Description of Artificial Sequence: Synthetic probe primer"
cacttgaagccctcggggaaggac

SEQ ID NO: 138 - DNA, 24 bp, Artificial Sequence
  source: /note="Description of Artificial Sequence: Synthetic probe primer"
tccttcagcttcagggccttgtgg

SEQ ID NO: 139 - DNA, 24 bp, Artificial Sequence
  source: /note="Description of Artificial Sequence: Synthetic probe primer"
caccttggagccgtactggaactg

SEQ ID NO: 140 - DNA, 24 bp, Artificial Sequence
  source: /note="Description of Artificial Sequence: Synthetic probe primer"
tgcggctcggtgcggaagttcacg

SEQ ID NO: 141 - DNA, 24 bp, Artificial Sequence
  source: /note="Description of Artificial Sequence: Synthetic probe primer"
acgcgacgctgctggttcgctggt

SEQ ID NO: 142 - DNA, 24 bp, Artificial Sequence
  source: /note="Description of Artificial Sequence: Synthetic probe primer"
cgttctagatcggagtagaatact

SEQ ID NO: 143 - DNA, 24 bp, Artificial Sequence
  source: /note="Description of Artificial Sequence: Synthetic probe primer"
tgtttcgttgcatagggtttggtt

SEQ ID NO: 144 - DNA, 24 bp, Artificial Sequence
  source: /note="Description of Artificial Sequence: Synthetic probe primer"
gcacacatagtgacatgctaatca

SEQ ID NO: 145 - DNA, 24 bp, Artificial Sequence
  source: /note="Description of Artificial Sequence: Synthetic probe primer"
gatatacttggatgatggcatatg

SEQ ID NO: 146 - DNA, 24 bp, Artificial Sequence
  source: /note="Description of Artificial Sequence: Synthetic probe primer"
cccggtagttctacttctgttcat

SEQ ID NO: 147 - DNA, 24 bp, Artificial Sequence
  source: /note="Description of Artificial Sequence: Synthetic probe primer"
attcgagccaatatgcgagaacac

SEQ ID NO: 148 - DNA, 24 bp, Artificial Sequence
  source: /note="Description of Artificial Sequence: Synthetic probe primer"
gccttcttgacgagttcttctgaa

SEQ ID NO: 149 - DNA, 24 bp, Artificial Sequence
  source: /note="Description of Artificial Sequence: Synthetic probe primer"
atggtggaaaatggccgcttttct

SEQ ID NO: 150 - DNA, 24 bp, Artificial Sequence
  source: /note="Description of Artificial Sequence: Synthetic probe primer"
gaggatcgtttcgcatgattgaac

SEQ ID NO: 151 - DNA, 24 bp, Artificial Sequence
  source: /note="Description of Artificial Sequence: Synthetic probe primer"
tgctttttgttcgcttggttgtga

SEQ ID NO: 152 - DNA, 24 bp, Artificial Sequence
  source: /note="Description of Artificial Sequence: Synthetic probe primer"
acctgtacgtcagacacgttctga

SEQ ID NO: 153 - DNA, 24 bp, Artificial Sequence
  source: /note="Description of Artificial Sequence: Synthetic probe primer"
aattaagtcaggcgcgcctctagt

SEQ ID NO: 154 - DNA, 24 bp, Artificial Sequence
  source: /note="Description of Artificial Sequence: Synthetic probe primer"
cttgtttcgagtagataatgccag

SEQ ID NO: 155 - DNA, 24 bp, Artificial Sequence
  source: /note="Description of Artificial Sequence: Synthetic probe primer"
acatagcgttggctacccgtgata

SEQ ID NO: 156 - DNA, 24 bp, Artificial Sequence
  source: /note="Description of Artificial Sequence: Synthetic probe primer"
gatctcctgtcatctcaccttgct

SEQ ID NO: 157 - DNA, 24 bp, Artificial Sequence
  source: /note="Description of Artificial Sequence: Synthetic probe primer"
cctgcaaagtaaactggatggctt

SEQ ID NO: 158 - DNA, 24 bp, Artificial Sequence
  source: /note="Description of Artificial Sequence: Synthetic probe primer"
aagggaaaacgcaagcgcaaagag

SEQ ID NO: 159 - DNA, 24 bp, Artificial Sequence
  source: /note="Description of Artificial Sequence: Synthetic probe primer"
tacctggtggagttcaagtccatc

SEQ ID NO: 160 - DNA, 24 bp, Artificial Sequence
  source: /note="Description of Artificial Sequence: Synthetic probe primer"
acggctgcttcatctacaaggtga

SEQ ID NO: 161 - DNA, 24 bp, Artificial Sequence
  source: /note="Description of Artificial Sequence: Synthetic probe primer"
tgaagctcttgttggctagtgcgt

SEQ ID NO: 162 - DNA, 24 bp, Artificial Sequence
  source: /note="Description of Artificial Sequence: Synthetic probe primer"
gtcttgtcgatcaggatgatctgg

SEQ ID NO: 163 - DNA, 24 bp, Artificial Sequence
  source: /note="Description of Artificial Sequence: Synthetic probe primer"
attcggctatgactgggcacaaca

SEQ ID NO: 164 - DNA, 24 bp, Artificial Sequence
  source: /note="Description of Artificial Sequence: Synthetic probe primer"
cgcttcgctaccttaggaccgtta

SEQ ID NO: 165 - DNA, 24 bp, Artificial Sequence
  source: /note="Description of Artificial Sequence: Synthetic probe primer"
cgatgctcaccctgttgtttggtg

SEQ ID NO: 166 - DNA, 24 bp, Artificial Sequence
  source: /note="Description of Artificial Sequence: Synthetic probe primer"
ggttgtgatgatgtggtctggttg

SEQ ID NO: 167 - DNA, 24 bp, Artificial Sequence
  source: /note="Description of Artificial Sequence: Synthetic probe primer"
gttcggagcgcacacacacacaac

SEQ ID NO: 168 - DNA, 24 bp, Artificial Sequence
  source: /note="Description of Artificial Sequence: Synthetic probe primer"
tttcccttcctcgcccgccgtaat

SEQ ID NO: 169 - DNA, 24 bp, Artificial Sequence
  source: /note="Description of Artificial Sequence: Synthetic probe primer"
taaaacgacggccagtgccaagct

SEQ ID NO: 170 - DNA, 24 bp, Artificial Sequence
  source: /note="Description of Artificial Sequence: Synthetic probe primer"
acgtcatcaccgagttcatgcgct

SEQ ID NO: 171 - DNA, 24 bp, Artificial Sequence
  source: /note="Description of Artificial Sequence: Synthetic probe primer"
agcgaaacatcgcatcgagcgagc

SEQ ID NO: 172 - DNA, 24 bp, Artificial Sequence
  source: /note="Description of Artificial Sequence: Synthetic probe primer"
aagccgaattccagcacactggcg

SEQ ID NO: 173 - DNA, 24 bp, Artificial Sequence
  source: /note="Description of Artificial Sequence: Synthetic probe primer"
ttggacttgctccgctgtcggcat

SEQ ID NO: 174 - DNA, 24 bp, Artificial Sequence
  source: /note="Description of Artificial Sequence: Synthetic probe primer"
tgccctgaatgaactgcaagacga

SEQ ID NO: 175 - DNA, 24 bp, Artificial Sequence
  source: /note="Description of Artificial Sequence: Synthetic probe primer"
ccgactacaagaagctgtccttcc

SEQ ID NO: 176 - DNA, 24 bp, Artificial Sequence
  source: /note="Description of Artificial Sequence: Synthetic probe primer"
tgctgaagggcgagacccacaagg

SEQ ID NO: 177 - DNA, 24 bp, Artificial Sequence
  source: /note="Description of Artificial Sequence: Synthetic probe primer"
ggacatcctgtccccccagttcca

SEQ ID NO: 178 - DNA, 24 bp, Artificial Sequence
  source: /note="Description of Artificial Sequence: Synthetic probe primer"
acatcgagacctccaccgtgaact

SEQ ID NO: 179 - DNA, 24 bp, Artificial Sequence
  source: /note="Description of Artificial Sequence: Synthetic probe primer"
agtctaacggacaccaaccagcga

SEQ ID NO: 180 - DNA, 24 bp, Artificial Sequence
  source: /note="Description of Artificial Sequence: Synthetic primer"
gatcgtcgaatgggaatccatggg

SEQ ID NO: 181 - DNA, 28 bp, Artificial Sequence
  source: /note="Description of Artificial Sequence: Synthetic primer"
ccctgagtgaaccatttaggaagatcag

SEQ ID NO: 182 - DNA, 24 bp, Artificial Sequence
  source: /note="Description of Artificial Sequence: Synthetic primer"
tgcaacatccaaagacccaacatg

SEQ ID NO: 183 - DNA, 22 bp, Artificial Sequence
  source: /note="Description of Artificial Sequence: Synthetic primer"
ttccaacatggttggtggtcag

SEQ ID NO: 184 - DNA, 26 bp, Artificial Sequence
  source: /note="Description of Artificial Sequence: Synthetic primer"
tgtcatgacatcttgttgctaccctg

SEQ ID NO: 185 - DNA, 22 bp, Artificial Sequence
  source: /note="Description of Artificial Sequence: Synthetic primer"
aaacccggagtttctatgcagg

SEQ ID NO: 186 - DNA, 591 bp, Zea mays
  VARIATION (22)..(22): /replace="c" or "g" or "t"
  misc_feature (22): /note="Nucleotide given in the sequence has no preference with respect to those in the annotation for said position"
  VARIATION (24)..(26): /replace="c" or "g" or "t"
  misc_feature (24)..(26): /note="Nucleotides given in the sequence have no preference with respect to those in the annotations for said positions"
  VARIATION (526)..(526): /replace="c" or "g" or "t"
  misc_feature (526): /note="Nucleotide given in the sequence has no preference with respect to those in the annotation for said positions"
  VARIATION (557)..(558): /replace="c" or "g" or "t"
  misc_feature (557)..(558): /note="Nucleotides given in the sequence have no preference with respect to those in the annotations for said positions"
  VARIATION (560)..(564): /replace="c" or "g" or "t"
  misc_feature (560)..(564): /note="Nucleotides given in the sequence have no preference with respect to those in the annotations for said positions"
  VARIATION (572)..(572): /replace="c" or "g" or "t"
  misc_feature (572): /note="Nucleotide given in the sequence has no preference with respect to those in the annotation for said position"
  VARIATION (576)..(576): /replace="c" or "g" or "t"
  misc_feature (576): /note="Nucleotide given in the sequence has no preference with respect to those in the annotation for said position"
  source: /note="bacm.pk108.h15 unique sequence"
ttgctcgtaacagatggttcaagaaagattgatcgtcgaatgggaatccatgggcacccacttgaaattcaggttttctttttgctacacctagttatattttctgtttcatacgggtcttttttcccaagttgattttttgtgattgtttttgaggcaccttttaaaagaataaaatacacaaacattcttcaaattgtctgggaatgtcatctaggttcccaaacgattagtttggattcaaaacatccctgatcttcctaaatggttcactcagggttcgatccttcaaaatcagctagtccacgaccatcctacttggcagcccctacatctctttctcccccctctcgttcacaccttgttaatgtccatcagcatagagtcttgttagtgtccacgtcgccagccaaaggatttaccatggggtttgcaccttgagtgaaccacataacaagttgagggacatgaaattgcaaattaatagctcagggatctcgataacatgcttggacaagttttagcaactgctgatgcatcttagtcctattaaaagaataaaaaacagtgcaacgacccctattttacacg

SEQ ID NO: 187 - DNA, 2000 bp, Zea mays
  source: /note="bacm.pk108.h15-2.fis47 unique sequence"
tgagaggctgatatgtcttcttttttttcttattttttctaaaatcctgattcctttcaatgtcagttttgaattccaaattcaaatttaatttgattctcaagcttcaattttaatgcaacatccaaagacccaacatgaaatgcataattccattttatttatcttattttatctattaaacaaagagtttcttaatatgaaacttatatacacaaaagacactattctaagaaaacaattcctcatatatcatcttaaatcttttgctgaatattctttaaacattaattctaaatagttttatttgtacaagaatttgtgattatttcctacgaagagatggttcctaggcactataatgaatagttttgctaattaaacaattgaaaatgtttctatgttctctgttttaaccttagtttagagtttttaacttcaagtttgaactaccaaagtttgaacctctttttttattttctttatacttttaaaatacatttaaactcaaatcttttggagaacctttataaatcccaaaatagggttttgaggtgttataaacgaggagtctgtgcatgggacggcaagtcacggtaagaccagtccaaccgaatgatggggcagctcggtgtcgtctcaattaatgcatctcttaagttgctgaccaccaaccatgttggaacctgatcagttggtacccattgtctgtttacatgtggtagcttctaattggttcgcgtgatcttgaattttaaaaaattgaaataacatttttataaaattagaatctagcttgtggtaacattgctcactccattgttgaatatatcaaaatggagaaagcacgacgttaaaatgcttgcaacatttatgtaggagtgttattttatgtttttgcgaggagtataatcgtagtgtcactgttgacaatctttggcgacttttagctaaaggagaggagagacaatttcttgctaatgataggaattatagattgcatatattgaaagtgatagagctagagtgcccgatctttcggtgagtggagataattccgatttggtggaagtagaccctcacgatccgactacgacgagcgaacccgaagcgccaatgcaatcgctgaaccaactcccaatggttaccgaccttgcttatgcgagatcggcctgatcacgaagatcgtttcctgtgcgcaatcgaagaacgaacaagaaaaagatgcgagcaatcttaatatcactcgaggtggagttctgaatcacagaggacaacacgtatttgtgtgtgttctggggtagctaaagctagatgtaaaacaaaactcaagttctaaatgaaacaggactctgactaaatagaggagaggcgtgaacagtaggtcgacgctacagtaccacgtttactgttcacgacttacctaggcgccccatccgggccttcctattggaccatcttctaatcttctgggccttcgttctttaacaacatgatgtagttcaattctcttgcacgagcctgagtcactggcccaagtggaagggtggcgcctggactagggaagatggtgcctgggctggagaaggtgctgctggtgtagatgtactcatgttggtgttgatgtcctcctcatcctccccttcttgaactgaagtcgtcctcgacggcaactcctcatcttctcccgcatacggtttcaaatctgcaacattaaaattagtggaaacaccaaacttcgcaggtaggtcaaggatataagcattagcattaatcttggttagtatcttaaaaggaccagcaacacgaggcatcaatttagaacggcgcaaagtaggaaaacgatcctttctcaaatgcaacccaaccatatcaccaggttcaaaagtaactaggtttctgggctttactaccaataatctgatatttagcattagcagcaacaatgttttgttgagtttgttctggaggttatcatttgttcacatgtgcacatcatc

SEQ ID NO: 188 - DNA, 1541 bp, Zea mays
  source: /note="bacm.pk010.m07-fis31 unique sequence"
atcgatacccttaattgggagataactgttatattaatagtgaaaaatccatcctattataatttttgttatatcttttacatggccatcagtaatcacagttaagagttggacaaaggcactatggagcgtggcccttctaattgtgttgctgaagttcttattaaggtttgccaattttttggtaggtgttccaaagcacagaaggctcttgagctaagccaacttttaggagtcaacatttcttcaacacaggtacttctgaagtagtcatgagtcattgcttatctgaagtaaggagagaaagttattgcttttcttttctgatgcgtgaggttgtgcatgtacattctatagagtgtgcctttcaagtactacatcaataatttcttatttcttcatagacctgtagcacctgaatgaaacctatttttgaactctgcattttttgaagatgacattatgtatcaatttagttctgtattggttgttgccaaaaaatttgtaagatattgagatagataatatatgtgatatttttttatgtagttgttttgcaataacattttgatgaatatttttgtatattattgtaacacataggcacctaactagtgtatatataggatggaaacacaaacaccatcgacgtcgatgatctcttggataccattatctagtgtaggtgtacatgggtattatgattatcatagtgtgtttatggttgtcatgacatcttgttgctaccctgacaggtaacctaaaaatccaaaacacaatgcaagtgcaggaatgtatgaccaatgcaaaagctaaagtaaagtgctttcacattcgttgccaatgaaagtttgaaaatgcttgaccagattttatcaactaataaatactgtatataataggtctaaatttgtgataacaaaacaagaaaaatagaaaagtggggaaacaaaaaatagtagaaagaggcgtggggagaggcgcgagagaggtggttggttgggggtggaggaccgtcggccttccccgtttcgtcttccggtcctcgttttatcccctcgcccttgcactcctccgccgcacccctttcctccttccgccctccgccgcgcctggctttctcccttcccgagaggccacgctccatccccgcccgcgctgcctcccctggcgatcggcggcgaccgcggcccaacgaaagcgtcgtggtcggccggtaagagttccttgctttcctctacgcgttgctcctgccgttacgcaaactttatgtgatcccttcctcgctgaacgagatgagaagaaaagttgctgactttcgttcacacgtgcacctgcatagaaactccgggttttggcttccgttggaaaattttgataaatgacttgccacgcttcgtcttacttcaaattcgttcaaattaattacttgctatgcttcatcttacttcaaattcgttcgattcttgctgggttcctctgattatatctttttttgtatgatcaagcgtaaagataccgtcgacctcccgctttttgaa

SEQ ID NO: 189 - DNA, 355 bp, Artificial Sequence
  source: /note="Description of Artificial Sequence: Synthetic polynucleotide"
attttagtgtcgaaaccatggtaaaatgaaatttgagtctcccaaccatatcaactttgctgacatagtagaattttagtgtccaaaccatagtacacattttggtccccggaggccggtaaggctatttttggcctcccgtvacacatgttttcatcgtcaaacaacgatttcatgcctcccgtccgccacccatgatttggccacwgagactgctaaggctrtttatggcctcccgtaagctatagcacamgttttcatggtcgagcgactatttttaagtacgtgttccaccacccgcgttttggtccccagagcaccttaaagttgttcttggcctcccacgagctgtagg

SEQ ID NO: 190 - DNA, 430 bp, Artificial Sequence
  source: /note="Description of Artificial Sequence: Synthetic polynucleotide"
gacatggtagaattttagtgtccaaaccaaagtacacgttttagtccccggaggcccgtaaggctattttggcctcccgtgacacatgtttttgtcgtcgaacagcgatttcgtgcctcccgaccgccacccatgatttgaccatagagactggtaaggttgttttggcctcccgtgagctatagcacacgttttcatggccgagcgaccatttttatgtccgtgttcctccacacgtgtttttgtccccggagcaccttaaagcggttcttggcctcccgcgagctatatcacacatttccgtggccaaacaaccaattttatgtatccgacctgccaccttcgttttagaccggggaggccgttatggcaatttttttgccacccgtgagctatagcacacgattttatggaaacctagaccctaaat

SEQ ID NO: 191 - DNA, 10368 bp, Zea mays
ggttccggtggcaaaaactcgtgctttgtatgcacccgacacccgttttcggaaagggtgacgtgcgacaacgaaattgcgcgaaaccaccccaaacatgagttttggacctaaagtagtggattgggcatgtttgttgctgatgtagctgaggtgcccgatctttcggcgagtagagataattccgatttggcggaagatgacccttgcgatccgactacgacgagcaagcccgaggcgccaatgcaatcgctgaaccaactccctgtggttaccgaccttgctgatgcgagatcggcctgatcacgaagatcgtttcctgtgcgcaatcgaagaacgaacaagaacaagatgcgagcaatctaatctattactcgagggtggagttctgaatacacgaggacagcgcagatttgcgcgtgttcggaagtagctaaggctaacgtaaaacaaaactccccaaaaataaaggaggcgcagctcctgtataaatagagagggggcgcagcccctaggggcggccaaccctaggtcgtccattatgggccgcaattgggctggtcgtctatccttccgggccttcgttctttaacaacatgatgtagttcaattctcttgcacgggcccgagtcactggcccaggtggaaggggtggcgcctgggctggagaaggtgctgctggtgtagatgtgctcgtgttggtgttgatgtcctcatcatcctccccttcttgaactgaagtcgtcctcgacggcaactcctcatcttctcccgcatacggtttcaaatctgcaacattaaaactagtggaaacaccaaactccgcaggcaggtcaaggatataagcattatcattaatcttggttagtaccttaaaaggaccagcagcacgaggcatcaatttagaacggcgcaaagtaggaaaacgatcctttctcaaatgcaaccaaaccatatcaccaggttcaaaagtaactagtttccggcctttactaccagtaatctgatatttagcattagcagcagcaatgttttgttgagtttgttcatggagattaatcatttgttcaacatgtgcaagagcatctatgtgtggggcgtccgtagcatcaagcgaaaacaaagcaataggcgccctaggaatgtaaccataaacaatttgaaaagggcacatctttgtagaagaatgtgttgcatgattataagcaaactcaacatgaggtaagcaatcctcccaacgtttcaaatttttgtctaaaacagccctaagcatggtagacaaagttcgattaactacctcagtttgaccatcagtctgagggtgacaagtggtgctaaacagcaatttagttcctaatttattccacagagatctccaaaaatgactcagaaacttggcatcacgatccgagactattgtattgggaataccgtgcaaacgaataatctctctaaaaaacaattcagcaacattgctagcatcatcagtcttatgacaaggtatgaaatgagccattttggagaatcgatcaacaaccacaaaaatgctatccctccccttcttagttctaggcaatcccaaaacaaaatccatcgaaatatcaatccaagggaaagtaggaacaggcaaaggcatatacaaaccatggttgttcaaccgtgacttagctttctgacaagtagtgcagcgtgcaacaaggcgctcaacatcagcgcgcatccgaggccaaaagaagtgggcagccaacacctcatgtgtcttgtagacgccaaagtgccccatgagaccgcctccatgtgcttcctgtaacaacaaaagacgaaccgagctagctggaacacacagcttgttagcgcgaaacaggaacccatcctgtatgtgaaatttgccccatggtttcccattaatacaatggccgaaagcatctttaaaatcagcatcgtcaacatattgatcttttacagtgtgcaaaccaaagattttaaaatctaactgtgacagcatggtatagcgacgagacaaagcatcagcaataacattgtccttcccgttcttgtgtttaataatgtaaggaaaagactcaatgaattctacccatttagcatgacgacggttcagatttgtttgggtacgaatatgttttaaagcctcatgatcagaatgaattatgaactcacgatgccaaagatagtgctgccatgtatgtaaagtgcgcactaacgcgtaaagctccttatcataagtagaatatttcagactagcaccgcttaatttttcactaaaataagcaactggttttccttcttgtaataaaacagcacctagcccaataccgctagcatcgcattcaagctcaaatactttattaaaatcaggcaattgcaataggggagcttgggttaacttatctttcaaagtgctgaacgcttcctcctgcgaatcactccaagcaaatggcacatctttctttgtaagctcatgtagaggcgctgcaatggagctaaaatcacgaacaaatctgcggtagaaaccggcaagtccaagaaagctccgaatttgtgtgaccgtcgtcggtgtaggccactcccgaatggcagcaatcttgctgctatccacctcaatgccctgtggagtaacaacataaccaagaaacgagacacgtcgtgtgcaaaagatgcatttttccatgttagcgaataactgggcggcacgcaatgcatcaaaaacagcacttaaatgttccaaatgctctttcttagatttgctgtaaataaggatatcatcgaaataaacaaccacaaacaatcctatgaagggcctcagaacttcattcatcactcgcataaaagtgctgggagcattagtcaatccaaacggcataaccaaccattcatataaaccaaatttcgttttgaaggctgttttccattcatcacctagtttcattctaatctggtggtaaccactacgcaaatcaatcttagtgaaaataatggcaccactaagctcatctagcatatcatcaaggcgtggtataggatagcgataacgaatagtgatattattaatagcacgacagtctacacacatacgccatgacccatccttcttgggaacaagtaacacaggaacagagcaagggctaagagactcacgaatgtatcctttgtcaagcaacgcctttacctggcgctgaatctccttcgtctcatccggatttgtacggtatggtgcgcggtttggaagctgtgcaccgggaatgaggtcgatctggtgctcaatgccacgaagcggtgggagacccggtggtaagtctttgggaaagacatcagcgtactcctgcaaaaggttagcaaccatagggggaatagccaaagatggtgcatcatcaagtgaaatgaggacactagagcatacaagtgcatagcatggcaaatgagcaccgtgtagatcatcaaaatcagcacgtgtagcaagtaaaacaggagccttcaacttaatttcagaaggaacagagtgcgatggatcaagttgtttagcagttatagcagctcgggcaagatcatctttaacaatttgttcaggtgtcattggatgtataattattttctgacccttaaaaatgaaagaataatgattcgaacgaccatgatgcaagctatcagtatcatattgccaaggtcgaccaagtaacaaagagcatgcttccatgggaataacatcacaatcaacaaaatcagaataagcacccatggagaaaggaactcgcacggaacgcgtgatttttattttaccaccatcattaagccattgaatgtgatatgggttcggatgcttacgagtgggtaacgacaacttttcgaccagcatggtactcgccaaattgttgcaactgccgctgtcgataatgatgcgaattgaccgctcctgcacaacaccctttgtatggaacagagtgtgtcgctgattcttctcgggcaaagcgacctgtgtactgagaacacgctgcacaacaagactttcatacctatcagcgtcgcccgggttgacatgtacctccgccttagctgcatggtcagtggcaagtagtgcatgttcaatttcttcagaatcactagcggaagagtactcaccatcgtcacgaatgagtaaagtgcgcttgtttggacagtcccgaatcacatggccaaatcctctacagcgatgacactgaatatcccgtgtacgacctgtgggtggggcagtgctggctggtttggtcgtcttctcgcgtggagtagtggtggacgtggatggcgcagggggaactggtgctgaggtggatgtcgagcttcgtcctgcaaaagggttagaatattgcttcgagcggcgtccctgcacttcacgttcagctttgcaagcatattcaaataaagtagtcatatcataatattccttataatcaagtatatcttggatttcgcggtttaaaccaccacgaaaacgtgccatagcagcgtcgttgtcctccaatatcccacaacgaatcatacctttttgtaactcctggaaatagtcctcaacagattgagaaccttgctgaaaacgctgcattttattaagcaaatcacgagcataatacgaaggcacaaatcgatgtcgcatcgcagctttcaactgatcccaagtggttggaatggtagtgggatgttttattttaaactcacgccaccaaattaaagcaaaatcagtaaattcactaatagcagctttaacctgagaatgtgcagcaatatcatggcatgaaaatttttgttcaacctctaactcccaatcaagatatgcagcaggatcatatttgccattaaaaggtggaattttaaatttaatcttagaaaataagtcattagggggattacgaaccacacggcgtgcacgaccacggcgatctccatcgtcccactcagtgtcaccgccgtagtcctgctccatctttgtggtcaacgcatcaaggcgtgctaggatggtgtcgagtgtggtgcgagtcgccgtttgagcaaggtcaagctggttgaaacgctcggtcgtcgaagtgaccgttgaatcaagccgttcatgcatcgtcctaatgtcatcagcaagtccatcaacttgtccctttacttccagcaactgggcatccaccgtgtcatgtgctcctgccatagttagcgcaaacaccaaaacaccaaaaaaaacgacaaaaacaggggtgtactgctcacaaggcgctcacactagtgctgttatcaaattcttatccgttcttaccaagccacagtggtgaactgcaaccaacaggtggaaccggtgaaagattggatgagcgattgcctggagaaacagaaacctactcgttgtagaaatatgtggagttctgggtaggctgcactcaagtcaaggattagcacgaccaaacaataatgcaaagttgaattatagtgcaaaacacgaaactatattgctggccacaagtgcaaaggacggatggaactagcagaatggcagtaccgtaaatattgtactagcgaggccactagtaggaatcacaagtgattttgtttttcttttttgtatgatttttttggtatttttctcagcacaagaagcaacaaaataggagctacacgaagtttcacctaaaacagagttcaaatgtggtctacagaaaatcagaaagttctctaaaaagcgtgcgagaactttgaaggattttttctttattttcctgaattttttttgacaattttgtcgaacccaaacagaccgaaggtcagtttggccggcctcagaatggtgtcaactagctcctgtaaaaatttcagatttttcggacacccgagcgaaaagttatgcccggtttaaggaaggtacctcaaattatgttttcaaacgaccggaatgaaacaaccgtatcctttctccttcgttgttttttgtttctgtttttttttttacgtaaccgaaggagaaaaacaaggaaacgatgttgactcggtttgtttttttttctgtttttttttctgttttttttcgtaaccgaaggagaaaatcaaggaaaacagccgttgactcggtttgttttttctgtttttttttgacgtaaccgaaggagaaaaacaaggaaacaatgttgactcggtttgtggtgtgatcaaacgagagatggtggcggcgctagggtttgaatggtggaagaacacaatgcaaccagcaacaaatgacgcgaaagcacacaaattcaacaatgcagattattgaaagaaagtgcgaggctcaaaagggtgctgggataagatctaacctgaatttttatgtggttttgtggactgtaggaaaaaaaaacgctcgataaactcaccgatcaacctagaaatctgataccaattgatgaagctgaggtgcccgatctttcggcgagtagagataattccgatttggcggaagatgacccttgcgatccgactacgacgagcaagcccgaggcgccaatgcaatcgctgaaccaactccctgtggttaccgaccttgctgatgcgagatcggcctgatcacgaagatcgtttcctgtgcgcaatcgaagaacgaacaagaataagatgcgagcaatctaatctattactcgagggtggagttctgaatacacgaagacagcgcagattagcgcgtgttcgagagtagctaaggctaacgtaaaacaaaactcaggaaataaaggaggcgcagctcctgaataaatagagagggggcgcagcccctaggggcggccaaccctaggtcgtccattatgggccgcaattgggctggtcgtctattcttccgggccttcgttctttaacaacatgatgtagttcaattctcttgcacgggcccgagtcactggcccaggtggaaggggtggcgcctgggctggagaaggtgctgctggtgtagatgtgctcgtgttggtgttgatgtccgcatcaacatcgcaatcaacataatcagaataagaacccagcgaaaaggggacacgtaccgaacgtgttacctttattttaccaccatcattaagccattgaatgtgatacggatgtggatgtgtgcgagtgggcaaggataatttctctaccaacgctgtacttgccaaattgttgcagctgccactatcgatgatgatgcgaatcgaccgttcgtgcacgacgcccttggtatggaatagagtgtgtcgctgatttttttcggcctgggcaacctgtgtgctgagaacacgctgcacaacaagactctcatacctatcagcgtcgatgggatcaacgtggacttcctcattttctgcatggttagtggcaatcatagcatgactagtttcctcagaatcactggctgaagagtactcaccattgtcacgtataagcaaggtacgcttgtttgggcagtcccgaatcatgtgcccaaaccctctgcaacgatggcactgaatatcccgtgtacgtcctgtggaagaagcggcgcctttggcagggggcgccactggcttggccggccctgtgcgcgatgtagtgctaggcgtaggaggtgcagggctggaaggagttgagctgtgtgttggaccccggcctgcaaaagagttagtatatgtctttgatcgtcgtccctgcacttcacgttcagctttgcaagcatattcaaacaatgtggttatatcaaaataatccttataatcaagtatatcctgaatttccctgttcaaaccaccacgaaaacgcgccatagcagcgtcatctgactcaaccaaaccacaacgaagcatacccttttgcaactcctggtaatattcctcaacagattgtgaaccttgttgaaaacgctgcattttgttaagcaaatcacgagcataataggaaggaacaaatctgtggcgcatggcagtttttaattgggtccaagtaatgacactgttaatgggaagtttttgtttatactcacgccaccaaattaaagcaaaatcagtaaattcactaatggcagccttcacttggctattagcaggaatatcatggcatgaaaatttctgttctacctctaattcccaatcaagatatgcagcaggatcatatttaccattaaaagatggaattttaaatttaatcttagaaaataagtcattagggggatgacgaaccacacgacgtgcacgaccacggcgatctccatcgtcctgctcagtgtcaccgccgtattcctgctccatctttgtggtcaatgcatcaaggcgtgccaggatggtgtcgagtgtggtgcgagtcgccgtttgagcaaggtcaagttggttgaaacgctcggtcgtcgaagtgatcgttgaatcaagccgttcatgcatcgtcctaatgtcagcagcaagtccatcaacttggccccttacttcctgcaactgggcatccaccatgtcgtgtgctcctgccatagttagcgcaaacaccaaaaggagaaaaaccaacgacaaaaacaggggtgtactgctcacaaggcgctcacactagtgctgttatcaagttcttatccgttcttaccaagccacagtggtgaactgcaaccaacaggtggaaccggtgaaagattggatgagcgattgcttggagaaacagaaacctgctcgtcgtagaaatatgtggagttgtgggtaggctgcactcaagtcaaggattagcacgatcaaacaataatgcaaagttgaattatagtgcaaaacacgaaactatattgctggccacaggtgcaaaggatggatggatggaaatagcagaatggcagtaacgtaaatattgtactagtgatgccaaaaaggcactagtacaaatcacaggtgattttgtttttcttttttgtatgatttttttgatatttttctcagcacaagaagcaacaagataggagctacacgaagtttcacctaaaacagatatcagatgtggtctacagaaaatcaggaagttctctgaaaagcgtgcgagaactttgacggatttttttctttattttcctgaatttttttgacaattttgtcgaaccccaaacagaccgtaggtgagtttggccgggctcagaatggtgtcaactagctcctgtaaaaatttcagattttttggacacccgagcgaaaagttatgcccggtttaaggaaggtaccctcaagttatgttttcaaacgaccgggatgaaacaaccgtatcctttctccttcgttgtttttttttgtttctgttttttttttgacgtaaccgaaggagaaaaacaaggaaacgatgttgcctcggtttttttttttctgttttttttcgtaaccgaaggagaaaaacaaggaaacggccgttgactcggtttgttttttctgtttttttttacgtaaccgaaggagaaaaacaaggaaacaatgttgactcggtttgtggcgtgatcaaaggggagatggtggcggcgctaggatatgaatggtggaagaacacaatgcaaccagcaacaaggaaacgcgaaagcacacaaattcaacaatgcagattattgaaagaaagtgcgaggctcaaaagggtgctgggataagaactaacctgaatttttatgtggttttgtggactgtaggaaaaaaaacgctcgataaactcaccgatcaacctggaaatctgataccaattgatgtagctgaggtgcccgatctttcggcgagtagagataattccgatttggcggaagatgacccttgcgatccgactacgacgagcaagcccgaggtgccaatgcaatcgctgaaccaactccctgtggttaccgaccttgctgatgcgagatcggcctgatcacgaagatcgtttcctgtgcgcaatcgaagaacgaacaagaacaagatgcgagcaatctaatctattactcgagggtggagttctgaatacacgaggacagcgcagatttgcgcgtgttcggaagtagctaaggctaacgtaaaacaaaactcccaaaaataaaggaggcgcagctcctgtataaatagagagggggcgcagcccctaggggcggccaaccctaggtcgtccattatgggccgcaattgggctggtcgtctatccttccgggccttcgttctttaacaacatgatgtagttcaattctcttgcacgggcccgagtcactggcccaggtggaaggggtggcgcctgggctggagaaggtgctgctggtgtagatgtgctcgtgttggtgttgatgtcctcatcacatgtttggggtggtttcgcgcaatttcgttgtcgcacgtcacacattccgaaaacggttgtcggggtgcatacaaagcacgagtttttgacaccggaacc

SEQ ID NO: 192 - DNA, 32 bp, Artificial Sequence; identical to SEQ ID NO: 5
  source: /note="Description of Artificial Sequence: Synthetic primer"

SEQ ID NO: 193 - DNA, 31 bp, Artificial Sequence
  source: /note="Description of Artificial Sequence: Synthetic primer"
ccctaaaccctaaaccctaaaccctaaaccc

SEQ ID NO: 194 - DNA, 708 bp, Zea mays
  VARIATION (7)..(73): /replace="c" or "g" or "t"
  misc_feature (7)..(73): /note="Nucleotides given in the sequence have no preference with respect to those in the annotations for said positions"
  source: /note="Maize BAC clone full insert sequence contig bacm2.pk170.a08.fis1"
ggcgaaaaaaaaaaaaaaaaaaaaaaaaaaaaaaaaaaaaaaaaaaaaaaaaaaaaaaaaaaaaaaaaaaaaactcatgtttggggtggtttcgcgcaatttcgttgtcgctcgtcacccattccgaaaacgggtgtcgggtgcatacaaagcacgagtttttgccaccggaaccatttcttcgttttcgcaaagaacatgcccaatccactactttaggtccaaaactcatgtttggggttgtttcgcgcaatttcgttgtcgcacgtcacacattccgaaaacgggttgtcggggtgcaaacaaagcacgagtttttgccaccggacccatttcttcgtttttcgcaacgaacatgcccaatccacaactttaggtccaaaactcatgtttggtgatgaggacatcactgccatcaatacaaccacaccagcgacccccttcaccatttaatcatggaccagtgaaacgagtccatgcacgtaaatttaattatcaggtgaactcgttccttgttattgaagctaatcattccttaaatgaggtactaataccttgtgattactttattatgctaaggtgtttgggaggtgaaccatctagaatttgagaaggcaacaaggcaataaaagctgctccacttgaagggatttcgtaactgcagcaagtgctagttgaagaggtcatatctttcaactcccaaggcca

SEQ ID NO: 195 - DNA, 530 bp, Zea mays
  VARIATION (4)..(79): /replace="c" or "g" or "t"
  misc_feature (4)..(79): /note="Nucleotides given in the sequence have no preference with respect to those in the annotations for said positions"
  source: /note="Zea mays BAC clone full insert sequence contig bacm2.pk170.a08.fis2"
tgaaaaaaaaaaaaaaaaaaaaaaaaaaaaaaaaaaaaaaaaaaaaaaaaaaaaaaaaaaaaaaaaaaaaaaaaaaaaagtagatcaatatgtcatcaaagtatactaccacaaattttccaatgaaggcacgcaaaacctcgttcattaatctcatgaaagtgctaggtgcattagttaacccaaaaggcatgactaaccactcatacaatccgaacttagttttgaaagcagttttccattcatctcccaatttcatacgaatctggtggtacccactacgcaaatcaactttagaaaagacgatggcaccactcaattcatcaagcatatcatctaaacgtggaatagggtgtcgataccgtatcgtgatattattaatagccctacaatcaacacacatacgccatgttccatcttttttaggcactaaaataaccggaacagcacacggactaagagactcacgcacgtaacctttgtcgagtagttcttgcacttgtcgctgaattccttttgtttcctctgga

SEQ ID NO: 196 - DNA, 655 bp, Zea mays
  VARIATION (10)..(74): /replace="c" or "g" or "t"
  misc_feature (10)..(74): /note="Nucleotides given in the sequence have no preference with respect to those in the annotations for said positions"
  source: /note="Zea mays BAC clone full insert sequence contig bacm2.pk170.a08.fis3"
ggcggcgaaaaaaaaaaaaaaaaaaaaaaaaaaaaaaaaaaaaaaaaaaaaaaaaaaaaaaaaaaaaaaaaaaagaaccatttcttcgtttatcgcaacgaatatgcccaatccactactttaggtccaaaactcatgtttggggtggttttgcgcaatttcgttgtcgcacgtcatacatttcgaaaacgggttgtcgggggtgcatataaagcacgagtttttaccagcggaaccatttcttcgtttttcgcaacgaacatgcccaatccactactttaggtccaaaactcatgtttggggtggtttcgctcaatttcgttgtcgcacgtcacccattccgaaaacgggtgtcggggtgcatacaaagcacgagttttgatgaggacatcactatcattgatacaaccataccagtgaccacttcaccatttgtaactaatcaaggaccaatgacacgagcctgtgcacgtaaacttaattatcacgtgaactcgatccttgctattgaagctaattcttctttaaatgaggtactaaagccttgcgatgactttattaatgctccggggtttgggaaagtgaaaccatcctgggaattaaaaaaagggaacaaggcaaaaagggctgctggcccccgagttgatttcggaaa

SEQ ID NO: 197 - DNA, 758 bp, Zea mays
  VARIATION (5)..(103): /replace="c" or "g" or "t"
  misc_feature (5)..(103): /note="Nucleotides given in the sequence have no preference with respect to those in the annotations for said positions"
  source: /note="Zea mays BAC clone full insert sequence contig bacm2.pk170.a08.fis4"
atccaaaaaaaaaaaaaaaaaaaaaaaaaaaaaaaaaaaaaaaaaaaaaaaaaaaaaaaaaaaaaaaaaaaaaaaaaaaaaaaaaaaaaaaaaaaaaaaaaaacgtgaacatcgtctccttccccaatcgagttattccacaccctctcatcgaaagatcgggcaatcacccaacgggtgcacatcagttggtaatcagagcaaggtttatcggtgagagatttacttttcttcgctgttttgttatctcctatagtccagaaaaagccaaaaaatagtagattagttttaccgcaatcctataaaccattgagcatttactagtactacttagttagggcttgttgagtttttggttgcatcggttgtgtcgagttgctgggtctagttttatcctttagagttttgagttctaccacgtttttgtcaccacgagatccacatccacataaacatctctgggtcgttttttgcaaccacggatacatctcaggtccgatttggaagttaaaatacaatctggaaagcctatcttatcttcttttcaacggatctggacttggtccaaaatttcttctggagggtccgcaatcctcggaaagttttggggatttcaatttaaaaaaatttgttaaatcctaatttaagggggcgttaaacaaaatcttttttggtttgggtgtgccaaggggaaaaaaaagggtttgggccctttcccaaaaaaccggggagggggggaaaaaaaaagaatttggaaa

SEQ ID NO: 198 - DNA, 722 bp, Zea mays
  VARIATION (1)..(1): /replace="c" or "g" or "t"
  misc_feature (1): /note="Nucleotide given in the sequence has no preference with respect to those in the annotation for said position"
  VARIATION (26)..(73): /replace="c" or "g" or "t"
  misc_feature (26)..(73): /note="Nucleotides given in the sequence have no preference with respect to those in the annotations for said positions"
  source: /note="Zea mays BAC clone full insert sequence contig bacm2.pk170.a08.fis5"
agcccgtaacactcctataggcgagaaaaaaaaaaaaaaaaaaaaaaaaaaaaaaaaaaaaaaaaaaaaaaaaaaaacgaagaaatggttccggtggcaaaaactcgtgctttgtttgcaccccgacaacccgttttcggaatgtgtgacgtgcgacaacgaaattgcgcgaaacaaccccaaacatgagttttggacctaaagtagtggattgggcatgttctttgcgaaaacgaagaaatggttccggtggcaaaaactcgtgctttatatgcacccgacacccgttttcggaatgggtgacgtgcgacaacgaaattgcgcaaaaccacctcaaacatgagttttggacctaaagttgtggattgggcatgttcgttgcgaaaaacgaagaaatggttccgctagcaaaaactcgtgctttgtgtgcaacccaacacccgttttcggaatgtgtgacgtgcgacaacaaaattgcgcgaaaccaccccaaacatgagttttggacctaaagtactggattgggcatgttcgttgcaaaaaacgaagagatggttccggtggcataaactcgtgctttgtatgcacctgacacccgtattcggaatgcgtgacgtgcgacaactaaattgcgtgaaaccaccccaaacatgagtattggacctaatgtagctgattgggcacgtacgttgcaaaaaacgaagagatgctctgctggcaaa

SEQ ID NO: 199 - DNA, 512 bp, Zea mays
  VARIATION (1)..(1): /replace="c" or "g" or "t"
  misc_feature (1): /note="Nucleotide given in the sequence has no preference with respect to those in the annotation for said position"
  VARIATION (36)..(37): /replace="c" or "g" or "t"
  misc_feature (36)..(37): /note="Nucleotides given in the sequence have no preference with respect to those in the annotations for said positions"
  source: /note="Zea mays BAC clone full insert sequence contig bacm2.pk170.a08.fis6"
agacgcgcgtatacgactcctatcgggcgagtgggaattcgacgcccgtcgaggtcgacggtacattcaacaagagcgttcatctcccaaggttgtttagtgcaaataagtacttgttggaaagcgctcttcgtctactttctggcggctgatgaatcaatgggagaaaccaaacgacacgtccagaaactgtagagagagcttcgttctccaccagaacttctttctattcctctatttaagcaactagcagccaccaaaggacttgggtttttgtttgatgtaagtttagcctttgctacttccttgtaaacgcgtgtgtctgctagaccacccggatacttgaaacagaaccccaactctatcagatccgtgagcgtctgctttttatcttgttcttgcttgttctcgattgcttgcaggttcaaggttgttcttggcacggcaagagcagcaacaacaggagctggtgtaactatcgctaaggcgcagcacccttgtggttgttgtag

SEQ ID NO: 200 - DNA, 647 bp, Zea mays
  source: /note="Zea mays BAC clone full insert sequence contig bacm2.pk170.a08.fis7"
ttaccaaagagcgagttccaaggccgtttaatgcaaataaatacttgttggaaagctcccttcgtctacttgctggtggatcaagaattaatgggagactacacccgaggcgtccaggaactgccgagggaacttcatgactccaccagaattccttcttcctatttctctatttaagcaactagcagccaccaaagaacttgggttttgtttgatgtaagtttagcctttgctacttccttgtaaacgcgtgtgtcggctagaccacccgaatacttgaaacgggaccccaactttatcagatccgtgcgtgtttgcttgttatcttgttctagcttgttctcgattgcttgcaggttcaaggctgttcttggcacggcaagagcagcaacaacaggagccggtgtaactatcgctaaggcgcagcacccttgtggttgtttgtatcggatagcacaacgtcgacctccaccccaaatcgaagttatcaggagacggtgtacctgttgctcaaggccccacaccatcttggttgtggaattcgggaagccaacgtcgttctcccacaaatttttccacctccttcatctttcatccaaaaaacggggaccccttccaccccttgggtttctcaaggggggaggaag

SEQ ID NO: 201 - DNA, 1024 bp, Zea mays
  source: /note="Zea mays BAC clone full insert sequence contig bacm2.pk170.a08.fis8"
gtagcatgacgaagttaagatctttggcacgagcccgagtgattggcccagctaatgaaggaagtggcgcttgatgtggaggtgctgctggtgtagtcgtactcatagtgatgtccttatcatcctccccttcttgaagtgaagtcgtcctcgacgacaactcctcatcctcggccatatatggtttcaaatctgcaacattaaaactagtggaaacaccaaattccgcaggcaggtcaaggatataagcattatcattaatctttgttagcaccttaaaaggaccagcagcacgagtcattaatttagaacagcgcaaagtaggaaaccgatcctttctcaagtgctaccaaaccatatcacctggctcaaaagtaacatgttttcttcctttactaccagcaacctgattttttgcattagtagcagcaatgttctgttttgtttgttcatgtatggtaatcatttgttcaacatgtgcagcagcatctacatgtggggcgttcgaagcattaagtgaaatcaaatcaataggtgccctaggaatgtaaccataaacaatctggaaaggggcacatctttgtagaagaatgcgtggcatgattgtaagcaaattcaacatgaggcaagcaatcctcccaacgtctcaaattcttgtctaaaacagccctaagcatggtagataaagttctatttactacctcagtttgtccatcagtctgagggtgacaagtagtgctaaacaacaatttagttcccaatttattccaaagagatctccaaaaatggcttagaaacttagcatcgcgatcagagactattgtttttggaataccatgtaaacgaataatttctctaaagaacaattcagcaacaatgctagcatcatcagttttatgacaaggtataaagtgagccattttagagaatctatcaacaaccacaaaaatactatccctccccttcttagttctaggcaagcccaaaacaaagtccatagagatatcaagccaaggagaagaag

SEQ ID NO: 202 - DNA, 776 bp, Zea mays
  source: /note="Zea mays BAC clone full insert sequence contig bacm2.pk170.a08.fis9"
ttctaaagcaagactaagcatcagaaaaccttttaataaaacaggtaatcaaggaattgtaataaattccaaggaaggaaatgcaacaagtgtttagcacacaactcctatcacctaatgcatcattcaagtgataattattaaaattcaaggaaagggtaaatgcaccagggcttgccttgtgttgtaggggagtcgggagctgtcccacagatatcaaaataaaaacagttcttggcaggtggagcctcagttggtggtgcagtctcttcttcaacacttacttcttcttcattttctatacataaccatatatgaacatgaatgcacatgtgatgctatgaatatgcaattataatagagatacttcaagttgtatcttgaatacaactttccttcatggtacacctgggtaattagggttttctgagtgaataccctagtagggttaagtagttttattcttaagaggctagggttttggggttttgggaccaaacaatgtccaaagcataccaaactttgtccaaaggctctaattaccaaattaagcttatacaaaaagttttatgatttttggagttatcaaataatttctaaaattccaaaagtctaggtttaggccttctcaaatactaaataattcatagttggggctaaaaatctgggaactatttttataaacactatgggaattttagaggctagtaaatttgatcccatatttttattatttttctagaatctctaaggatttcaaactttcctggaaaaag

SEQ ID NO: 203 - DNA, 1083 bp, Zea mays
  source: /note="Zea mays BAC clone full insert sequence contig bacm2.pk170.a08.fis10"
tttcatgaacctagtcattacatcttccatgcattcatctaaacgagcaaacatggtataaattttaaaatcataataataatctttcacagtcctagcaccctgctttaaggtgtctaatttagaaagcaaatgatcagaatagtatgcaggaatgaatgcatctctaaaatgaagtttgaagtcttcccaagattgtggaactttgttatgcctacaaatgtatttccattccatcaatgcgtgctcagttaacaaattagaggcaatataaatcttttgtttttgagatagatcatgcttatcaaattccttatctacctttagctcccaatcaatgtatgcatgaggatcgaatttaccggcatatgaaggcaagtgtcgaatgatgccttgaatataatgttcagttggctcaaaaatctccatatcacctgccatgtttaataaagacaagaaaacaataaaaatatctttgatcctataaactactaggaatcattgttgtaatctctcattctcaaactggttaagcaagttcttacaaattctcaccacgcaatacaggaggtgccggcaaacagcaagaacaacaacaatggtggcagctagcacaacctggtggtgttgtagaaaaatttgtggatttataggtagctgcaatttcaatagttccaaggaatagctagtaccacgttagccacaacaagttgaataaacgttccacaatggtgttgtgctggtcctagtccaaaccgtaatagagacgcgagccgttacacaaatagtatcaccagaagctcagaacagcaatcggaatcctgaaactataaaaagatggcacacaaactgccttttgttttgtcgcacttacaaattttatctaccaaaattcagaactggtttttctctctctctctattttttgcacgtgtctttttttttgctgattagtgcggcttttttttatgcactcgccttttgctttctcttctttttggttgaattacagcaagaggtctaaactggtgattgaaacaaggtggcgcgaactcgaaactctagcgttaagaaaactttaga

SEQ ID NO: 204 - DNA, 1050 bp, Zea mays
  source: /note="Zea mays BAC clone full insert sequence contig bacm2.pk170.a08.fis11"
tgtgacgtgcgacaacgaaattgcgcgaaacaaccccaaacatgagttttggacctaaagtagtggattgggcatgttctttgcgaaaacgaagaaatggttccggtggcaaaaactcgtgctttatatgcacccgacacccgttttcggaatgggtgacgtgcgacaacgaaattgcgcaaaaccacctcaaacatgagttttggacctaaagttgtggattgggcatgttcgttgcgaaaaacgaagaaatggttccgctagcaaaaactcgtgctttgtgtgcaccccaacacccgttttcggaatgggtgacgtgcgacaacgaaattgcgcgaaaccaccccaaacatgagttttggacctaaagtagtggattgggcatgttcgttgcgaaaaacgaagaaatggttccgatggaaaaaactcatgcttttatgcacctcgatacccgttttcagaatgggtgacgtgcgacaacgaaattgcgcgaaaccaccccaaacatgagttttggacctaaactagtggattgggcatgttctttgcgaaaacgaagaaatggttccggtggcaaaaactcgtgctttgtatgcacccgacacccgttttcggaatgggtgacgtgcgacaacgaaattgcgcaaaaccacctcaaacatgagttttggacctaaagttgtggattgggcatgttcgttgcgaaaaacgaagaaatggttccgctagcaaaaactcgtgctttgtgtgcaccccaacacccgttttcggaatgtgtgacgtgcgacaacgaaattgcgcgaaaccaccccaaacatgagttttggacctaaagtactggattgggcatgttcgttgcgaaaaacgaagaaatggttccggtggcaaaaactcgtgctttgtatgcacctgacacccgttttcggaatgggtgacgtgcgacaacgaaattgcgcgaaaccaccccaaacatgagttttggacctaaagtagtggatcgggcacgttcgttgcgaaaaactaagaaatggttccgctggcaaaaactcg

SEQ ID NO: 205 - DNA, 774 bp, Zea mays
  VARIATION (682)..(682): /replace="c" or "g" or "t"
  misc_feature (682): /note="Nucleotide given in the sequence has no preference with respect to those in the annotation for said position"
  source: /note="Zea mays BAC clone full insert sequence contig bacm2.pk170.a08.fis12"
gatcgtttctgatcgtgatgctaaatttcttagtcatttttggaggactttgtgggcaaaattggggactaagcttttattttctactacatgtcatcctcaatctgatggtcaaactgaagttgtgaatagaactttgtctactatgttaagggcagttctaaagaagaatattaagatgtgggaggactgtttgcctcatgttgaatttgcttataatcgatcattacattctactacaaagatgtgcccatttcagattgtatatggtttgttgcctcgtgctcctattgatttaatgcctttgccatcttctgaaaaactaaattttgattctactaggcgtgctgaattgatgttaaaactgcatgaaactactaaagaaaacatagagcgtatgaatgctagatataagtttgctagtgataaaggtagaaaggaaataaattttgaacctggagatttagtttggttgcatttgagaaaggaaaggtttcctgaattacgaaaatctaaattgttgcctcgagctgatggaccgtttaaactgctagagaaaattaacgacaatgcatataggctagatctgcctgcagactttggggttagccccacatttaacattgcagatttaaagccctacttgggagaggaagttgagcttgagtcgaggacgactcaaatgcaagaaggggagaatgatgaagacatccacactactgatacatctatgccaatacaagtaccaatttctgggtccattactcgcgctcg

SEQ ID NO: 206 - DNA, 679 bp, Zea mays
  source: /note="Zea mays BAC clone full insert sequence contig bacm2.pk170.a08.fis13"
ccaaagagatctccaaaaatggcttagaaacttagcatcacgatcagagactattgtttttggaataccatgtaaacgaataatttctctaaagaacaattcagcaacaatgctagcatcatcagttttatgacaaggtataaagtgagccattttagagaatctatcaacaaccacaaaaatactatccctccccttcttagttctaggcaagcccaaaacaaagtccatagagatatcaagccaaggagaagaagggacaggcaaaggcatatacaaaccatggttgttcaaccgtgacttagctttctgacaagtagtgcagtgtgcaacaaggcgctcaacatcagcgcgcatccgaggccaaaagaagtgggcagccaacacctcatgtgttttgtagacgccaaaatgccccatgagaccgcctccatgcgcctcctgtaacaacaaaagacgaaccgaactagctggaacacacagcttgttagggcgaaataggaacccatcctgtatgtgaaatttgccccatggtatcccatttatacaatggccgaaagcatctttaaaatcagcatcgtcaacatattgatccttcacagtgtccaaaccaaagattttaaaatctaattgtgacaacatggtatagcgacgagacaaagcgcatcagcaataacat

SEQ ID NO: 207 - DNA, 1008 bp, Zea mays
  source: /note="Zea mays BAC clone full insert sequence contig bacm2.pk170.a08.fis14"
tttctgatcgtgatgctaaatttattagtcatttctggaggactttgtgggcaaaattggggactaagcttttattttctactacatgtcatcctcaaactgatggtcaaactgaagttgtgaatagaactttgtctactatgttaagagcggttctaacgaagaatattaagatgtgggaggactgtttgcctcatgttgaatttgcttataatcgatcattgcattctactacaaagatgtgcccatttcagattgtatatggtttgttgcctcgtgctcctattgatttaatgcctttgccatcttctgaaaaactaaattttgatgctactaggcgtgctgaattgatgttaaaactgcatgaaactactaaagaaaacatagagcgtatgaatgctagatataagtttgctagtgataaaggtagaaaggaaataaattttgaacctggagatttagtttggttgcatttgagaaaaggaaaggtttcctgaattgcgaaaatctaaattgttgccctcgagccgatggaccgtttaaagtgctagagaaaattaacgaccatgcatataggctagatgtgcctgcagactttgggggttagcccactttttaacattgcaagatttaaagcccctactttgggaaaaagaattttaaacttgagttgaaggacccacccaatatgccaaaaaggggggaaaaatgtttgaaaaacctccccccccatattggatacacctttttgccaaaaacaagaaacccattttttgggggccccattatacttttgggggccaaaaaaaaccggcggcttgtttcttcttaaaaccaaaccaaccggggggagatcccacctcgttgagaggggcgcgccctcaatattttacaacccgggcggggggcccctttttttttttttaaaaaacccgcgggggaaaaccccggggggggaaaaggtttttaaaagggggggcttccttgtcttgagaaaaaaacccttgt

SEQ ID NO: 208 - DNA, 488 bp, Zea mays
  source: /note="Zea mays BAC clone full insert sequence contig bacm2.pk170.a08.fis15"
tctgagcgctccgcaatcatcgtagagatttctggactttctatattaacaagatttgttaaatctgatttaaaggggctgttagcaatatctttattgtttgggttgtcatagtgaaaaaaagggtttaggcccctgcaaaaaaaaagaagaagaagaagaaaaagaatagaaaagaaaaaaaagaggaaaagaagaagaagggggctgaatctctaaatctgttgtttctctttgtgctgtgctagttgttctttttcagtgactacatttatgcctaggaccagcacagtaccaccgttgaacgattattcagcttgcttttgtaactaacgtggtactggtgtattccttgcttcagcccacctacaactctacatatttcgactacagtttgacaggtcgtgttgctgcggcaccgatacacttattccacggttgcagacttgttggttgctgacccctcctgttgtgcaaggtaagaattg

SEQ ID NO: 209 - DNA, 1142 bp, Zea mays
  VARIATION (373)..(373): /replace="c" or "g" or "t"
  misc_feature (373): /note="Nucleotide given in the sequence has no preference with respect to those in the annotation for said position"
  source: /note="Zea mays BAC clone full insert sequence contig bacm2.pk170.a08.fis16"
gacatgagatgtatccgtggtggcaaaaacgaaccagacatgtttatggtgatggtggatctcgtggtgaccaaaacgtggtagaactcaaaactctaaaggaataaactaagaccagcaactcgacacaaccgatgcaaccaaaaactcaacaagccctagctaagtagtactagtaaatgctcaatggtttataggattgcggtaaaactaatctactttttttggctttttctagactataggagataagaaaacagcgaagaaaagtaattctctcaccgataaaccttgctctgattaccaactgatgtgcacctgttgggtgattgcccgatcttttgatgagagggtgtggaataactcgattggaggaggagacgacgttcacggcccgactacagccttccaaagacgctgcgccttagcaaccgatacaccacctcctatggctgtcacgatcttgtggagcgtgacaccctggccactagggcactcgtcctgaaagcaatcgaagaactagcaagaacaagtagaacaagtactgaattaccagatctaaatgtaggtttaaaaatcaaactccaatatggtggggttccgaagacaagaagacgggcggctgaactagcacgcgcgcttgcaagcaagtagcgagagctaaacttgatctaaacaaaactcgctgttcttggtggcggctagggggtttataaacatgggaggacgaccacaagggtattggggtcgtgctgcaaccctaggatgcgtccctaatggacctaacttgatacacgacccattgggccaaaatagggtgacgcagcaccatgggcagaaaaggcaggaaatgtctcggtaagaaaacaatgattatggcggcctcagaacagatatgactataattccggatccatatgaaagtagacttgataagctttccatgttgtgcttgaacattccaatccgagcccgcatctgaccgtggtgaccgtcacaagttggtgttcttctgcagtccgaatccagcatgttcaaatccttttccctttcggtcttctccctgattcctacgcaaaacaagagtgcacgggtctccatggtctaaatatgatggacatgaactcaagagtgtaatcacc

SEQ ID NO: 210 - DNA, 673 bp, Zea mays
  VARIATION (483)..(483): /replace="c" or "g" or "t"
  misc_feature (483): /note="Nucleotide given in the sequence has no preference with respect to those in the annotation for said position"
  VARIATION (615)..(615): /replace="c" or "g" or "t"
  misc_feature (615): /note="Nucleotide given in the sequence has no preference with respect to those in the annotation for said position"
  VARIATION (618)..(618): /replace="c" or "g" or "t"
  misc_feature (618): /note="Nucleotide given in the sequence has no preference with respect to those in the annotation for said position"
  VARIATION (633)..(633): /replace="c" or "g" or "t"
  misc_feature (633): /note="Nucleotide given in the sequence has no preference with respect to those in the annotation for said position"
  source: /note="Zea mays BAC clone full insert sequence contig bacm2.pk170.a08.fis17"
cctgttgattgcagttcaccactgtggcttggtaagaacgtataagaacttgataatagcattccattgagcgagcaagttgtcaccaccattcccctgttgtcgtcggtttgtctcattttggtgttttggtgtttgcgctaactatggcaggagcacacgacatggtggatgcccagttgcaggaagtaaggggacaagttgatggacttgctgctgacattaggacgatgcatgaacggcttgattcaacgatcacttcgacgaccgagcgtttcaaccaacttgaccttgctcaaacggcgactcgcaccacactcgacaccatcctggcacgccttgatgcattgaccacaaagatggagcaggaatacggcggtgacactgagcaggacgatggagaccgccgtggtcgtgcacgccgtgtggttcgtcatccccctaatgacttattttctaagattaaatttaaaattccatctattaatggtaaatatgatcctgctgcatatcttgattgggaattggaggtagaacagaaattttcatgccatgatattcctgctaaatagcaagtgaaggctgcaattagtgaatttactgattttgctttaattaggtgggcgtgatataaacaaaaacttttccattacagtgtcattacttggaccca

SEQ ID NO: 211 - DNA, 964 bp, Zea mays
  VARIATION (865)..(865): /replace="c" or "g" or "t"
  misc_feature (865): /note="Nucleotide given in the sequence has no preference with respect to those in the annotation for said position"
  source: /note="Zea mays BAC clone full insert sequence contig bacm2.pk170.a08.fis18"
tatgcacctcgatacctgttttcagaatgggtgacgtgcgacaacgaaattgcgcgaaaccacctcaaacatgagttttggacctaaagtagtggattgggcatgttcgttgcgaaaaacgaagaaatggttccgctggtaaaaactcgtgctttgtatgcaccccgacacccgtttttgaaatgggtaacttgtgacaacgaaattgcgcgaaaccaccccaaacatgagttttggacctaaagtagtggattgggcatgttcgttgcgaaaaacgaagaaatggttccgctggcaaaaactcgtgctttgtatgcaccccgacacccgttttcggaaggtgacgtgcgacaacgaaattgcgcgaaaccaccccaaacatgagttttggacctaaagtagtggattgggcatgttcgttgcgaaaaacgacaaaatggttccggtggcaaaaactcgtcctttgtatgcacccgacacccgttttcggaatgggtgacgtgcgacaacgaaattgcgcgaaaccaccccaaacatgagttttggacctaaagtagtggattgggcatgttcgttgcgaaaaacgaagaaatggttccggtggcaaaaacacgtgcttttatgcacctcgatacctgttttcagaatgggtgacgtgtgatgtagctgaggtgcccgatcttttggcgagtagagataattccgatttggcggaagatgacccttgcgatccgactacgacaagcaagcccgaggcgccaatgcaatcgctgaaccaactccctgtggttaccgaccttgctgatgcgagatcgacctgatcacgaagatcgtttcctgtgctcaatcgaagaacgaacaagaaaaagatgcgagcaatctaatctattactcgagggtggagttctgaatacacgaagacagcgcagatttgcgcgtgttcgagagtagctaaagctaacgt

SEQ ID NO: 212 - DNA, 892 bp, Zea mays
  source: /note="Zea mays BAC clone full insert sequence contig bacm2.pk170.a08.fis19"
ttagaacttcattcatcactcgcataaaagtgctgggagcattagtcaatccaaacggcataaccaaccattcatataaaccaaatttcgttttaaaagccgttttccattcatcacccagtttcattctaatccggtggtaaccactacgcaaatcaatcttagtgaaaataatggcaccactaagctcatctagcatatcatcaaggcgtggtataggatatcgataacgaatagtgatgttattagtagcacgacagtctacacacatacgccatgacccatctttcttgggaacaagtaacacaggaacagagcaagggctaagagactcacgaatgtatcccttttcaagcaacgcctgtacttggcgctgaatctccttcgtctcatccggatttgtacggtacggtgcgcggttcggaagctgtgcgccgggaatgaggtcgatctggtgctcaatgccacgaagtggtgggagacccggtggtaagtctttgggaaagacatcagcgtactcctgcaaaaggttagcaatcatagggggaatagccaaagatggtgcatcatcaagtgaaatgaggacactagagcatacaagtgcatagcatggcaaatgagcaccgtgtagatcatcaaaatcagcacttgtagcaagtaaaacaggagcctttaacttgatttcagaaggaacaaagggcgatggatcaagttgtttagcagttatagcagctcgggcaagatcatctttaacaatttgttcaggggtcattggatgtataattattttctgacccttaaaaatgaaagaataatgattcggacgaccatgatgcaagctatcagtatcatattgccaaggtcgaccaagtaacaaagagcatgctttcat

SEQ ID NO: 213 - DNA, 933 bp, Zea mays
  source: /note="Zea mays BAC clone full insert sequence contig bacm2.pk170.a08.fis20"
tttctttgtaagctcatgtagaggcgctgcaatggagctaaaatcacgaacaaatctgcggtagaaatcggcaagtccaagaaagctccgaatttgtgtgaccgtcgtcggtgtaggccactcccgaatggcagcaatcttgctgctatccacctcaatgccctgcggagtaaccacataaccaagaaacgagacacgttgcgtgcaaaatgtgcacttttccatgttaccaaacaagcgagcagcacgcaaagcataaaaaacagcacgcaaatgttctaaatgctcctctatagacttgctgtaaataaggatatcatcgaaataaacaacaacaaacaaacctatgaaggcccgtagaactttgttcattaaacgcataaaggtgctgggagcattagtcaatccaaatggcataaccaaccattcatataaaccaaatttcgttttaaaagtcgttttccattcatcaccgagtttcattctaatctgatggtaaccgctacgcaaatcaaccttagagaaaataaaggcaccactaagctcatctaacatatcatcaaggcgtggaataggatatcgataacgaactatgatgttattaatagcacgacaatctacgcgcatacgccatgacccatctttctttggaacgagtaaaacaggaaccgagcaagggctaagagactcacgaatgtaacctttatcaagcagcatctgcacctggcgctggatctccttcgtctcatctggatttgtacggtacggggcgcggttcggaagagaagcgccggggatgagatcgatctgatgctcaatgccacggagtggaggaagaaccgatggtaagtccgtaggaaaaacatcagcatactcctgccaaaggttaaacaacagcaggggggtattcccaaagacggtgccacaaccaag

SEQ ID NO: 214 - DNA, 672 bp, Zea mays
  source: /note="Zea mays BAC clone full insert sequence contig bacm2.pk170.a08.fis21"
gtgatacggatgtggatgtgtgcgagtgggcaaggataatttctctaccaacgatgtacttgccaaattgttgcagctgccactatcgatgatgatgcgaatcgaccgttcgtgcacgacgcccttggtatggaatagagtgtgtcgctgatttttttcggcctgggcaacctgtgtgctgagaccacgctgcacaacaagactctcatacctatcggcgtcgatgggatcaacgtggacttcctcattttctgcatggttagtggcaatcatagcatgactagtttccttagaatcactggctgaagagtactcaccattgtcacgtataagcaaggtacgcttgtttgggcagtcccgaatcatgtgcccaaaccctctgcaacgatggcactgaatatcccgtgtacgtcctgtggaagaagcggcgcctttggcagggggcgccactggcttggtcgtccctgtgcgcgatgtagtgctaggcgtagaaggtgcagggctggaaggagttgagctgtgtgttggaccccggcctgcaaaagagttagtatatgtctttgatcgtcgtccctgcacttcacgttcagctttgcaagcatattcaaacaatgtgggtatatcaaaaataatcccttatatcaagtatatcctgaatttccctgtttcaac

SEQ ID NO: 215 - DNA, 1053 bp, Zea mays
  VARIATION (889)..(889): /replace="c" or "g" or "t"
  misc_feature (889): /note="Nucleotide given in the sequence has no preference with respect to those in the annotation for said position"
  source: /note="Zea mays BAC clone full insert sequence contig bacm2.pk170.a08.fis22"
ctgtgtctccgctcgtgcaggctgagggctggaaaaacgcctggcatgcttccgcgcgtgcaggctgcgtccggatggcgcaggcaaccaatcacatgctcgttcatggtcaatgcacacaacgggcctgggtctggctatccgagcaaccaatcacacccaatgattacggcggcctcagtacagatatgactataattctggatccatatgaaagtagacttgataggctttccatgttgtgcttgaacattccaatccgagcccgcatgtgaccgtggtgaccgtcacaagttggtgttcttctgcagtccgaatccagcatgttcaaatccttttccctttcggtcttctccctggttcctaagcaaaacaagagtgcactccatggtctaaatatgatggacatgcattcaagagtgtaatcacctgatggttgagttgacgagcacgagcgcgagtaatgggaccagaaattggtacttgtattggcatagatgtatcagtagtgtggatgtcttcatcagttgccttctcaaattctagatggtttacctcccaaacaccttagcataataaagtaatcacaaggtattaatacctcatttaaggaatgattagcttcaacaacacggaacgagttcacctgatgattaaatttacgtgcacggactcgtttcactggtccatgattaaatggtgaagggggtcgctggtgtggttgtattgatggcagtgatgtcctcatcaaccacataaaagttcaggttagaccttataccagcacccttttgagcctcgcactttctttcaataatctgcattgttgaatttgtgtgctttcgcgtcatttgttgctggtcgcattgtgtttttttctcgccatccatttctttctccttgtttttctccctcggttacattcaaaccctagcgcggcgcaaccatctttccttggttttgtccttcgggtacatcaaaccctagcggggccgaaccatcttcccttggttctctcgttcgggttacacaaaccgagtcaacccgctttcc

SEQ ID NO: 216 - DNA, 1048 bp, Zea mays
  source: /note="Zea mays BAC clone full insert sequence contig bacm2.pk170.a08.fis23"
tttaaatacaatctggaaagcttatcttatcttctttccaacggatctgaccttgtctcaaaattcattctgagcgctccgcaatcatcgtagagatttctggactttctatattaacaagatttgttaaatctgatttaaaggggctgttagcaatatctttattgtttgggttgtcatagtgaaaaaaagggtttaggtccctgcaaaaaaaacagaagaagaagaaaaaaaaagaatagaaaagaaaaaaaaggaaaagaagaagaagggggctgaatctctaaatctgttgtttctctttgtgctgtgctagttgttcttttttagtgactacctttgtgcctaggctcacgtctctagcatggtttagcctaggaccagcacagtaccaccgttgaacgattattcagcttgcttttgtaactaacgtggtactagtgtattccttgcttcagcccacctacaactctacatatttcgactacagtttgacaggtcgtgttgctgcggcaccgatacacttattccacggttgcagacttgttggttgctgacccctcctgttgtgcaaggtaagaattggtaagagcttgtgaggcaggttgagagtgagcgccttgcagtagctacatcctaatagttgtagagtttttattccttcacattttttttcttgttgcctctgttcatctaaccatggcaggattggaggttgatgatgcttctcgtaatatgccacactctcctcgcaccaagggtatcatacaacactttgtaaggctggtgaaaacgcacacggaaggtcttgataatgacatgcaggtgacgaatgaaaagatggggcaattggaggccacacagatcgacacaaacaccaaacttgcaaatgtggaaatgacagttgctcatattgacaagagccttgtcgcactcttgaggcgatttgatgagatgcatgctaataccaatggtgggcgtgatgagggcgccgaaggtaactgggatgactatgttgctgatactgaacaagatgaccaagaagcac

SEQ ID NO: 217 - DNA, 1314 bp, Zea mays
  VARIATION (500)..(500): /replace="c" or "g" or "t"
  misc_feature (500): /note="Nucleotide given in the sequence has no preference with respect to those in the annotation for said position"
  source: /note="Zea mays BAC clone full insert sequence contig bacm2.pk170.a08.fis24"
tttgtgtgcaccccaacacccgttttcggaatgtgtgacgtgcgacaacgaaattgcgcgaaaccaccccaaacatgagttttggacctaaagtactggattgggcatgttcgttgcgaaaaacgaagaaatggttccggtggcaaaaactcgtgctttgtatgcacctgacacccgttttcggaatgggtgacgtgcgacaacgaaattgcgcgaaaccaccccaaacatgagttttggacctaaagtagtggattgggcacgttcgttgcgaaaaacgaagaaatggttccgctggcaaaaactcgtgctttgtgtgcaccccgacacccgttttcgaaatgggtgacgtgcgacaacgaaattgcgcgaaaccaccccaaacatgagttttggacctaaagtagtggattgggcatgttcgttgcgaaaaacgaaaaaatggttccgctcgcaaaaactcgtgctttgtatgcacctgacacccgttttcggaatgagtgacgtgcgacaacaaaattgcgcgaaaccacctcaaacatgagttttggacctaaagtagtggattgggcatgttcgttgcgaaaaacgaagaaatggttccactggcaaaaactcgtgctttgtatgcaccccgacacccgttttcggaatgggtgacgtgcgacaacgaaattgagcgaaaccaccccaaacatgagttttggacctaaagtagtggattgggcatgttcgttgcgaaaaacgaagaaatggttccgctgacaaaaactcgtgctttgtatgcacccccgacaacctgttttcgaaaatgtgtgacgtgcgacaacgaaattgcgcgaaaccaccccaaacatgagttttgcacctaaagtagtggattgggcatattctttgcgaaaaacgaagaaatggttccggtggcaaaaactcgtgctttgtatgcacccgacacccgttttcggaatgggtgacgtgcgacaacgaaattgcgcgaaaccaccccaaacatgtgttttggacctaaagtactggattgggcatgttcgttgcgaaaaacgaagaaatgcttccggtggcaaaaactcgtgctttgtatgcacctgacacccgttttcggaatgggtgacgtgcgacaacgaaattgcgcgaaaccaccccaaacatgagttttggacctaaagtagtggattgggcacgttcgttgcgaaaaacgaagaaatggttctgctcgcaaaaactcgtgctttgtgtgcaccccgacacccgttttcgaaatgggtgacgtgcgacaacgaaattgcgcgaaaccac

SEQ ID NO: 218 - DNA, 936 bp, Zea mays
  source: /note="Zea mays BAC clone full insert sequence contig bacm2.pk170.a08.fis25"
tcgtaccagcttggttaccttgaccttaccactattgttgagccattgaatgtgatatggatgcgggtgtggtttggtcgtaagtgcaagcttctccaccatgtcgctgctagccaagttgttgcagctacctccatcaatgatcaaacgacatgaacgctccttaatgacacactttgtttgaaacaacgtatgtcgctgattctgctctgccttctccatttgtgcactaagcacacgctgtacaatgaggctctcataatgctctgcatcatctgcaccaatctgttcttcgggtggttccttagtgcctgcatcatcagccgcaagcaaagcaagtgtagcttcatccaaatcactagcagaggaatacccaccatcgtcttttaccaccaaaacacgctgattaggacaatcacgctgcacgtgtctatagcccttgcatcgataacacagaacatctcttgttctacccgtggaggctactgaagaggcactacctgctggtttctgggcagatttggttgctgaatttgtggaaaatgcacgtggtttgtcgccggaggaaggcgggggtgctggtcgacttggcgagggagttggtgctggtgtacggccggtcatggacgtagtcgtgcgctgttgccatggtgtagattttcctgcagaaacattagaccttgcactagcacgtcgtccctgcacttccctttcagctttgcaagcaagatgaaacaatcgggttacattagcataatctttataagcaaggatgtcctgaatttccctatttaaccctgccaaaaatctagccatagcagattcctcaccctcctctatgttacaacgcagcatacccattttgtattcccctgatatattcttctacacttttagtacccctgtctcatttgtgcaacttgttttaacatatca

SEQ ID NO: 219 - DNA, 1427 bp, Zea mays
  source: /note="Zea mays BAC clone full insert sequence contig bacm2.pk170.a08.fis26"
gtaacctccatgaccaaactcaacaaaacatggctgctgctaatgctaaatatcagattactggcagtaaaggccggaaactagttacttttgaaccctggtgatatggtttggtcgcatttgagaaaggatcgtttccctcctttgcgtcgttctaaattgatgcctcgtgctactggtccttttaagatactaaccaagattaatgcaaaacatcaggttgctggtagtaaaggaagaaaacttgttacttttgagccaggtgatatggtttggttgcacttgagaaaggatcggtttcctattgtgcgtcgttctaaattaatgcctcgtgctgctggtccttttaaagtgctaacaaagattaatgataatgcttatatctttgacctgcatgcggaatttggtgtttccactagttttaatgttgcagatttgaaaccatataatggccgaggatgaggagttgccgtcgaggacgacttcacttcaagatggggaggatgatgaggacatcactatgagtacgactacaccaacaacacctccacatcaagcgccacttccttcattagctgggccaatcactcgggcccgtgccagagatcttaacttcgtcatgctactgaagaatgagggcccagaagaatagacgaccagcccaactgcggcccatagtggacgacctagggttggccgcccctaggggctgcgccctctctatttatccaggagttgtgcctcctttattttcgagttttgttttacgttagccttagctactctcgaacacgcgcaaatctgcgctgtcttcgtatattcagaactccaccctcgagtaatagattagattgctcgcatctttttcttgttcgttcttcgattgcgcacaggaaacgatcttcgtgatcaggccgatctcgcatcagcaaggtcggtaaccacagggagttggttcagcgattgcattggcgcctcgggcttgctcgtcgtagtcggatcgcaagggtcatcttccgccaaatcggaattatctttactcgccgaaagatcgggcacctcagctacatcaaagtgattcgcaggaggaagcgttcggcactttgaaagataagttaatccaagctcccatattgcaattgcctgattttaataaagtgtttgagcttgaatgcgatgctagctgtattgggctaggtgctgttttgttacaagaaggaaaaccagttgcttattttagtgaaaaattaagcggtgctagtctgaaatattctacttatgataaggagctttacgctttagtgcgcactttgcatacatggcagcactatctttggcatcgtgagttcataattcattctgatcatgaggctttaaaacatattcgtacccaaacaaatctgaaccgtcgtcatgctaaatgggaa

SEQ ID NO: 220 - DNA, 1214 bp, Zea mays
  source: /note="Zea mays BAC clone full insert sequence contig bacm2.pk170.a08.fis27"
tagtttgttgctccttttgctaagaaaatatcaaaaaaatcatacaaaaaagaaaaacaaaatcacctgtgattcctactagtgcctttttggcctcgctagtacaatatttacggtactgccattctgctagttccatccgtcctttgcacttgtggccagcaatatagtttcatgttttgcactataattcaactttgcattattgtttgatcgtgctaatccttgacttgagtgcagcctacccaaaactccacatatttctacgacgagaaggtttttgtttctccaggcaatcgctcatccaatctttcaccggttccacctgttggttgcagttcaccactgtggcttggtaagaacggctaagaatttgataacagcatttcattgagcgagttgtcaccaccatttccctgttgtcgtcggtttttctccttttggtgttttggtgtttgcgctaactatggcaggagcacacgacacggtggatgcccagttgctggaagtaaggggacaagttgatggacttgctgctaacattagaacgatgcatgaacggcttgattcaacggtcacttcgacgaccgagcgtttcaaccagcttgaccttgctcaaacggcgactcgcaccacctcgacaccatcctggcacgccttgatgcgttgaccacaaagatggagcaggactacggcggtgacactgagtaggacgatggagatcgccgtggtcgtgcacgccgtgtggttcgtcatccccctaatgacttattttctaagattaaatttaaaattccaccttttaatggcaaatatgatcctgctgcatatcttgattgggagttagaggttgaacaaaaattttcatgccatgatattgctgcacattctcaggttaaagttgctattagtgaatttactgattttgctttaatttggtggcgtgagtataaaatgaaacattccactgccattccaaccacttgggatcagttgaaagctgcgatgcgacatcgatttgtgccttcgtattatgctcgtgatttgcttaataaaatgcagcgttttcagcaaggttctcaatctgttgaggactatttccaggagttacaaaaaggtatgattcgttgtgggatattggaggacaacggcgctgctatggcacgttttcgtggtggtttaaaccgcgaaatctaggatatacttgattataa

SEQ ID NO: 221 - DNA, 1214 bp, Zea mays
  source: /note="Zea mays BAC clone full insert sequence contig bacm2.pk170.a08.fis28"
aacaattctataaagggcctcagaacttcattcatcactcgcataaaagtgctgggagcattagtcaatccaaacggcataaccaaccattcatataaaccaaatttcgttttaaaagccgttttccattcatcacccagtttcattctaatctggtggtaaccactacgcaaatcaatcttagtgaaaataatggcaccactaagctcatctaacatagcatcaaggtgtggtataggatatcgataacgaatagtgatgttattaatagcacgacagtctacacacatacgctatgacccatcttttttgggaacaagtaacacatgaacagagcaagggctaagagactcacgaatgtatcccttgtcaagcaacgcctgtacctggcgctgaatctccttcgtctcatccggatttgtacggtacggtgcgcggttcggaagctgtgcgccggggacgaggtcgatctggtgctcaatgccacgaagtggtgggagacccggtggtaagtctttgggaaagacatcagcgtactcctgcaaaaggttagcaaccatagggggaatagccaaagattgtgcatcatcaagtgaaatgaggacactagagcatacaagtgcatagcatggcaaatgagcaccgtgtagatcatcaaaatcagcacgtgtagcaagtaaaataggagccttcaacttgatttcagaaggaacagagggcgatggatcaagttgtttagcagttatagcagctcgggcaagatcatctttaataatttgttcaggtgtcattggatgtataattattttctgacccttaaaaatgaaagaataatgattcgaacgaccatgatgcaagctatcagtatcatattgccaaggtcgaccaagtaacaaagagcatgcttccatgggaataacatcacaatcaacaaaatcagaataagcacccatggagaaaggaacacgcacggaacgcgtgatttttattttaccaccatcattaagccattgaatgtgatatgggtttggatgcttacgagtgggtaacgacaactttttgaccaacatggtactcgccaaattgttgcaactgccgctgtcgataatgatgcgaattgaccgctcctgcacaacaccctttgtatggaacagtgtgtcgctgattcttctcgggcaaagcgacatgtgtattaagaacacgctgcacaacaa

SEQ ID NO: 222 - DNA, 1485 bp, Zea mays
  source: /note="Zea mays BAC clone full insert sequence contig bacm2.pk170.a08.fis29"
ctgttttcagaatgggtgacgtgcgacaacgaaattgcgcgaaaccacctcaaacatgagttttggacctaaagtagtggactgggcatgttcgttgcgaaaaacgaagaaatggttccggtggtaaaaactcgtgctttgtatgcaccccgacacccgttttcgaaatgggtgacgtgcgacaacgaaattgcgcgaaaccacaccaaacatgagttttggacctaaagtagtggattgggcatgttcgttgcgaaaaacgaagaaatggttccggtggcaaaaactcgtgctttgtatgcacccgacacccgttttcggaatgggtgacgtgcgataacgaaattgcgcgaaaccaccccaaacatgagttttggacctaaagtagtggattgggcatgttcgttgcgaaaaacgaagaaatagttccggtggcaaaaactcgtgcttttatgcacctcgatacctgttttcagaatgggtgacgtgcgacaacgaaattgcgcgaaaccacctcaaacatgagttttggatctaaagtagtggattgggcatgttcgttgcgaaaaacgaagaaatggttccgctggcaaaaactcgtgctttgtatgcaccccgacacccgttttcggaatgggtgacgtgcgacaacgaaattgagcgaaaccaccccaaacatgagttttggacctaaagtagtggattgggcatgttcgttgcgaaaaacgaagaaatggttccggtggcaaaaactcgtgctttgtgcacccgacacccgttttcggaatgggtgacgtgcgacaacgaaattgcgcgaaaccaccccaaacatgagttttggacctaaagtagtggattgggcatgttcgttgcgaaaaacgaagaaatggttccgatggaaaaaactcatgcttttatgcacctcgatacctgtttactgaatgggtgacgtgcgacaacgaaattgcgcgaaaccaccccaaacatgagttttggacctcaactagtggattgggcatgttcgttgcgaaaaacgaagaaatggttccggtggcaaaaactcgtgctttgtatgcacctgacacccgttttcggaatgggtgacgtgcgacaacgaaattgcgcgaaaccaccccaaacatgagttttggacctaaagtagtggattgggcacgttcgttgcgaaaaacgaagaaatggttccgctggcaaaaactcgtgctttgtgtgcaccccgacacccgttttcgaaatgggtgacgtgcgacaacgaaattgcgcgaaaccaccccaaacatgagttttggacctaaagtagtggattgggcatgttcgttgcgaaaaacgaaaaaatggttccgctcgcaaaaactcgtgctttgtatgcacctgacacccgttttcggaatgggtgacgtgcggcaacgaaattgcgcaaaaccaccccaaacatgagttttggacctaaagtagtatctagcgtga

SEQ ID NO: 223 - DNA, 1422 bp, Zea mays
  source: /note="Zea mays BAC clone full insert sequence contig bacm2.pk170.a08.fis30"
tgagaagcatcatcaacctccaatcctgccatggttagacgaacagaggcaacaagaaaaaaaatgtgaatgaataaaaactctacaactattaggatgtagctactgcaaggcgctcactctcaacctgtcacacaagctcttaccaattcttaccttgcacaacaggaggggtcagcaaccaacaagtctgcaaccgtggaataagtgtatcggtgccgcagcaacacgacctgtcaaactgtagtcgaaatatgtagagttgtaggtgggctgaagcaaggaatacactagtaccacgttagttacaaaagcaagctgaataatcgttcaacggtggtactgtgctagtcctaggctaaaccatgctagagacgtgagcctaggcacaaaggtagtcactgaaaaagaacaactagcacagcacaaagagaaacaacagatttagagattcagcccccttctttctttttcctttttttttcttttcttttcttttttttttcttcttttatttgcaggggcctgaaccctttttttcactatgacaacccaaacaataaggatattgctaacaacccctttaaatcagatttaacaaatcttgttaatatagaaagtccagaaatctccacgatgattgcggagcgctcagaatgaattttgagataaggtcagatccgttggaaagaagataagataagctttccagattgtatttaaacttccaaatcggacatgagatgtatccgtggtggaaaaaacgaaacagagatgtttatggtgatggtggatctcgtggtgaccaaaacgtggtagaactcaaaactctaaaggaataaactaagaccagcaactcgacacaaccgatgcaaccaaaaactcaacaagccctagctaagtagtactagtaaatgctcaatggtttataggattgctgtaaaactaatctactatttttttggctttttctggactataggagataagaaaacagcgaagaaaagtaaatctctcaccgataaaccttgctctgattaccaactgatgtgcacccgttgggtgattgcccgatctttcgatgagagggtgtggaataactcgattgggggaggagacgacgttcacggcccgactacagccttccaaagacgctgcgcctcagcaaccgatacaccacctcctatggctgtcacgatcttgtggagcgtgacaccctggccactagggcactcgtccctgcagcaatcgaagaactagcaagaaacagtagaaacagtactgaattaccagatctaaatgtagggttaaaaatcaaactccaatatggtggggttccgaagacagaagacgggcggctgaactagcacgcgcgcttgccagcaagtagcgagagctaaacttgatctaacaaaactcgct

SEQ ID NO: 224 - DNA, 1416 bp, Zea mays
  source: /note="Zea mays BAC clone full insert sequence contig bacm2.pk170.a08.fis31"
gttgtcgcacgtcacccattatgaaaacgggtgttgggtgcatacaaagcacgagtttttgccaccggaaccattttttcgtttttcgctacgaacatgcccaatccactactttaggtccaaaactcatgtttggggtggtttcgcgcaatttcgttgtcgcacgtcacctatttcgaaaacgggtgtcggagtgcatacaaagcacgagtttttgccaccggaaccatttcttcgttttttgcaacgaacatgcccaatccactactttaggtccaaaactcatgtttggggtggtttcgcgcaatttcgttgcctcacgtcacccattccgaaaacgggtgtcgggtgcatacaaagcacgagtttttgccaccggaaccatttcgtcgtttttcgcaacgaacatgcccaatccactactttaggtccaaaactcatgtttggggtggtctcgcgcaatttcgttgtcgcacgtacccattccgaaaacgggtgtcggggtgcatacaaagcacgagtttttaccagcggaaccatttcttcgtttttcgcaacgaacatgcccaatccactactttaggtccaaaactcatgtttgaggtggtttcgcgcaatttcgttgtcgcacgtcacccattctgaaaacaggtatcgaggtgcataaaagcacgagtttttgccaccggaaccatttcttcgtttttcgcaacgaacatgcccaatccactactttaggtccaaaactcatgtttggggtggtttcgcgcaatttcgttgtcgcacgtcacccattccgaaaacgggtgtcgggtgcatacaaagcacgagtttttgccaccggaaccatttcttcgtttttcgcaacgaacatgcccaatctactactttaggtccaaaactcatgtttggggtggtttcgcgcaatttcgttgtcgcacgtcacccatttcgaaaacgggtgtcggggtgcatacaaagcacgagtttttaccaccggaaccatttcttcgtttttcgcaacgaacatgcccagtccactactttaggtccaaaactcatgtttgaggtggtttcgcgcaatttcgttgtcgcacgtcacccattctgaaaacaggtatcgaggtgcataaaagcacgagtttttgccaccggaaccatttcttcgtttttcgcaacgaacatgcccaatccactactttaggtccaaaactcatgtttggggtggtttcgcgcaatttcgttgccgcacgtcacccattccgaaaacgggtgttaggtgcatacaaagcacgagtttttgccaccggaaccatttcttcgtttttcgcaacgaacatgcccatatccactactttaggtccaaaactcatgtttggggtggtttcgcgcaatttaatcctctatctaacgtca

SEQ ID NO: 225 - DNA, 1911 bp, Zea mays
  source: /note="Zea mays BAC clone full insert sequence contig bacm2.pk170.a08.fis32"
gtagtcgaaatatgtagagttgtaggtgggctgaagcaaggaatacactagtaccatgttagttacaaaagcaagctgaataatcgttcaacggtggtactgtgctggtcctaggctaaaccaggctagagacgtgagcctaggcacaaaggtagtcactgaaaaagaacaactagcacagcacaaagagaaacaacagatttagagattcagcccccttcttcttcttttcctttttttttcttttctattctttttttttcttcttcttctgttttttttgcaggggcctaaaccctttttttcactatgacaacccaaacaataaagatattgctaacagccccttaaaatcagacttaacaaatcttgttaatatagaaagtccagaaatctctatgatgattgcggagcgctcagaacgaattttgagataaggtcagatccgttggaaataagataagataagctttccagattgtatttaaacttccaaatcggatatgatatgtatccgtggtggcaaaaacgaaccagagatgtttttggtgatggtggatctcgtggtgaccaaaacgtggtagaactcaaaactctaaaggaataaactaagaccagcaactcgacacaaccgatgcaaccaaaaactcaacaagccctaactaagtagtactagtaaatgctcaatggtttataggattgcggtaaaactaatctactatttttttggctttttctggactataggagataagaaaacagcgaagaaaagtaaatctctcaccgataaaccttgctctgattaccaactgatgtgcacccgttgggtgattgcccgatctttcgatgagagggtgtggaataactcgattgggggaggagacgacgttcacggcccgactacagccttccaaagacgctgcgccttagcaaccgatacaccacctcctatggctgtcacgatcttgtggagcgtgacaccctggccactagggcactcgtcctgcaagcaatcgaagaactagcaagaacaagtagaacaagtactgaattaccagatctaaatgtaggtttaaaaatcaaactccaatatggtggggttccgaagacaagaagacgggcggctgaactagcacgcgcgcttgcaagcaagtagcgagagctaaacttgatctaaacaaaacccgctgttcttggtggcggctagggggtttataaacatgggaggacgaccacaagggtattggggtcgtgctgcaaccctaggatgcgtccctaatggacctaacttgatacacgacccattgggccaaaatagggtgacgcagcaccatgggcagaaaaggcaggaaatgtctcggtaagaaaacaatgattacggcggcctcagaacagatatgactataattccggatccatatgaaagtagacttgataagctttccatgttgtgcttgaacattccaatccgagcccgcatctgaccgtggtgaccgtcacaagttggtgttcttctgcagtccgaatccagcatgttcaaatccttttccctttcggtcttctccctggttcctaagcaaaacaagagtgcacgggtgtccatggtctaaatatgatggacatgaactcaagagtgtaatcacctgatggttgagttgacgagcacgagcacgagtaatgggaccagaaattggtacttgtattggcatagatgtatcagtagtgtggatgtcttcatcagagtcaagaagttctctcgacagtttctggacgcctcatttggtatctctaattgattctttctccaccaaaaaggagacgaagagtgctttccatcaagtgcttatttgccttcattggccttgggagttgaaagatatggcctcttcaacttgcacttgctgcagttac

SEQ ID NO: 226 - DNA, 2144 bp, Zea mays
  VARIATION (343)..(343): /replace="c" or "g" or "t"
  misc_feature (343): /note="Nucleotide given in the sequence has no preference with respect to those in the annotation for said position"
  source: /note="Zea mays BAC clone full insert sequence contig bacm2.pk170.a08.fis33"
taaaaagcacgagtttttgccaccggaaccatttcttcgtttttcgcaatgaacatgcccaatccactactttaggtccaaaactcatgtttggggtggtttcgcacaatttcgttgccgcacgtcacccattccgtaaacgagtgttggggtgcatacaagcatgagtttttgccacttgaaccatttcttcgtttttcgcaacgaacatgcccaatcagtactttaggtctaaaactcatgtttggggtcgttgcgcacaatttcgttgccgcatgtcactcattccgaaaacgggtgtcggggtgcatacaaagcacacgtttttgccaccggaactatatctttgtttttttctcaacgaacatgcccaatccactactttaggtccaaaactcatgtttggggtggtttcgcacaatttcgttgccgcacgtcacccattccgtaaacgagtgttggggtgcatacaagcatgagtttttgccacttgaaccatttcttcgtttttcgcaacgaacatgcccaatcagtactttaggtctaaaactcatgtttggggtcgttgcgcacaatttcgttgccgcatgtcacccattccgaaaacgggtgtcggggtgcatacaaagcacacgtttttgccaccggaactatttctttgtttttttctcaacgaacatgcccaatccactactttaggtccaaaaacaagtttggggtgctttcgtgcaatttcgttgcgacacatcaccaattccgaaaacgggtgtcgagatgcaaacaagcacgagttcttgccactggaaccatttctttgctttttcgcaacgaacatgcccaatccacaactttaggtccaaaactcacgtttggggtggtttcacgcaatttcgttgccgcacgtcacccacttcgaaaataggtttcagggtgcattcaaagcacgggtttttgccaccggaaccatttcttcgtttttcgcaacgaacatgcccaaaccactactttaggtcaaaaactcatgtttgggtggtttcgcgcaatatcgttgccgcacgtcacccgttccgaaaacgggtgtcgaggtgcatacaagcacgagtttttgccaccggaactatttcttcgtttttcgcaacgaacatgcccaatccactactttaggtccaaaactcatgtttggggtattttcgctcaattttgttgctgcaggtcactcattccaaaaacgggtgtcggggtgcattcaaagcacgagtttttgccaccagaaccatttcttcgtttttcgcaacgaacatgcccaatccactactttaggtccaaaactcatgtttgggtggtttcgcacaatttcgttgtcgcacgtcacccattccgaaaacgggtgtcggggtgcatacaaagcacgagtttttgctaccttaactgatagagctggagtgcccgatctttcggtgagtggagataattttgatttggtggaagtagacccttgcgatccgactacgacgagcaagcccgaggcgccaatgcaatcgctgaaccaatccctgtggttaccgaccttgctgatgcgagatcggcctaatcacgaagatcgtttcctgtgcgcaatcgaagaacgaacaagaacaagatgcgagcaatctaatctattactcgagggtggagttctgaatacacgaagacagcgcagatttgcgcgtgttcgagagtagctaaggctaacgtaaaacaaaactcgagaataaaggaggcgcagctcctggataaatagagggggcgcagcccctaggggcggccaaccctaggtcgtccactatgggccgcagttgggctggtcgtctattcttctgggccctcattcttcagtagcatgacgaagttaagatctctggcacgggcccgagtgattggcccagctaatgaaggaagtggcgcttgatgtggaggtgctgctggtgtagtcgtactcatagtgatgtcctcatcatccactactttaggtccaaaactcatgtttggggtggtttcgcgcaatttcgttgtcacacgttacccatttcaaaaatgggtgtcggggtgcatacaaagcacgagtttttaccagcgaaaccatttcttcgtttttcgcaacgaac

SEQ ID NO: 227 - DNA, 1403 bp, Zea mays
  source: /note="Zea mays BAC clone full insert sequence contig bacm2.pk170.a08.fis34"
ctttaatcgtctctaatccaaagattttgtagtcaagttgattcagcaaagtatatctcctagacaaagcgtcagcaatgatattctcttttcctttcttgtgcttaataacataaggaaacgattcgataaattcaacccacttagcatgtctacggttcagttttccttgactacgaatatgtttcaaaggttcatgatcagaatgaataacaaactctttgggccacaaataatgctgccatgtttctaatgttcgcacaagagcatataatttcttatcataagtagaataatttagaacagacccactcaatttttcactaaaatatgcaacaggtttgccttcttgtaacaaaacaccacccaatccaattccactagcatcacattcaagctcaaaagtcttattaaaatcaggaagttggaggagaggtgcatgtgtcaacttatctttcagcacgttgaaagcgtgctcttgtactttgccccaactaaaatgcactcccttcttcgtaagctcattcaaaggtgcagcaatggtgctaaagtccttcacaaaacggcgatagaagccagcaagtcctaggaaactccgcacctgtgtgatagtctttggcataggccatccatgtatcgcttctaccttggcttgatcaacctcaattccctgtggagtcacaacataaccaagaaacgaaactcgatcggtgcaaaatgtgcacttctcaaggttaccaaataaacgtgcatctcgtaaagcattaaaaacagcacgcatgtgatcaacatgttcatccatagatttgctgtagatcaatatgtcatcaaagtatactaccacaaattttccaatgaaggcacgcaaaacctcgttcattaatctcatgaaagtgctaggtgcattagttaacccaaaaggcatgactaaccactcatacaatccgaacttagttttgaaagcagttttccattcatctcccaatttcatacgaatctggtggtacccactacgcaaatcaactttagaaaagacaatgacaccactcaattcatcaagcatatcatctaaacgtggaatagggtgtcgataacgtatcgtgatattattaatagccctacaatcaacacacatacgccatgttccatcttttttaggcactaaaataaccggaacagcacacggactaagagactcacgcacgtaacctttgtcgagtagttcttgcacttgtcgctgaatttcttttgtttcctctggatttgtcctatatggcgcacgattcggcaaagatgcaccaggaatgagatcaatttgctgctcgatcactcgtataggtagcagcccctctagtatctcacttggaaatacatcagactactcctgcacaatgttagtaata

SEQ ID NO: 228 - DNA, 2103 bp, Zea mays
  VARIATION (2098)..(2098): /replace="c" or "g" or "t"
  misc_feature (2098): /note="Nucleotide given in the sequence has no preference with respect to those in the annotation for said position"
  source: /note="Zea mays BAC clone full insert sequence contig bacm2.pk170.a08.fis35"
cttgctttaaccggatgaaatcttcttgtttcatatggagcactccctcaggaacataatgctcccggaatgcttgcttgaattcctcccaggtgatctgatgtcgagccggttgaattgctacaaaatttgcccaccaagtactggcagtccctcttagttgatgtgcagcgaacagtgacttctgcgtctccgtgcaacatcatgtgcgcgagtcaccccaccatcatgtgcgcgagtccgtgatggcatctgaggcaaagaaacatttgggaaaatataacatgctagcacataccatcatattacattaccaaaatgtaataattatacagactccagcgtacaacttgacttcagtacttattttacataattataacatctaaactatgctattctagtcttcgtcatccttagttgcttcatttcctgctgcaggagaccgttcatcaggaaggttcatggaaggagggggccgaaaaaggtccaactcctcatcaggtccttcatttgctgttcctgaaggtccggctgccattgcaacagcgtcggaaggcacgtccgggtgcagtcgagcatacagtacatgtacttcttcatgtaaagtattacagtacactcgcaagctgtcgagggccgcactaagctctgccacacgagctcgagcttttgcttcgcggtcccaagcgatcgaacgtgagttgacggcccaatcaatggccgaatcccgttctgatatctcatattgcaagcagctgacgtcagctgacaattcagctatgcgttggctgtcctgcgcccatgccctattctggtgacgtagctctgaccgaagtggttccaccttggcctccaagtctccaatcgggttagtgttgccactactactcccttcatgtctggggctagctgatggcgaggcacgccaaaaggtccagtagacttgcgtgcagttttgcttgtacgcgccatgtctccataagatgggaagatttattagtagattcttaacatgatgcatgcataacctaatcaatatggaatcaaccttcattgatccccaacttcctatacattgcactctgttaccctgtccttacaagataagggacttccagaaagtggtaataaatgaaagaatatttctagataagggtttaaaaattcctttgaagtactacgtaatatctgagaagatgggcttcgctccgataccagctgtgacggaacctcccaaggtattaggcccacctacagttgtccttgtcctaaggaccttggacaaccttgtagatgcaaataatcactcgacaagttcggtactgtatcttcatcattctgcccaagagcgcttcacccgtcatgcagatattacatcacgtcggaggaaagaataagcggaagcaaattaaaataacttaatttacattgatccaatatagagagagtattattattacaatactagggtactatgagtgcataaaatattattattacagacccgggaggcaaaacaccctcccgcacacaagtttattgtttttaaagtgggaggccaacatcctcccgtgacttcactgctggggctcttccttgggtaccacctttgaacaaaaacagcaaaagtctgttgtttcctcacctacaacaacatgggttcgaaaaccatgagtacggagtgtactttttcaagtcttacccgataaaagaaaagactctcaaggatatgctggcttgagggagtcaaggtaaggctattcaaagaatcaaagactctatttgcagaaatgcttactgatagtggatccttaaaaatccagttttattatcaagttaagtcattacctgtagctagagttctttctaccctagttcaagcacttggcctacactagccatcttttatcatccctttttactttactggattgctacgtgtaagtcagtgaccaagtcttcatgtccgagaagtaacggcgatccaaatcgattaatactcagctgaggatctccaatcacacgacatatgtagcacttaacccttggatatgtcaatttgccaccgggtttcttaagacctgaccggttcacagccac

SEQ ID NO: 229 - DNA, 1585 bp, Zea mays
  source: /note="Zea mays BAC clone full insert sequence contig bacm2.pk170.a08.fis36"
gaaattgcgcgaaaccaccccaaacatgagttttggacctaaagtagtggattgggcatgttcgttgcaaaaaacgaagaaatggttccggtggcaaaaactcgtgctttgtgtgcaccccgacaacccgttttcggaatgtgtgacgtgcgacaacgaaattgcgcgaaaccaccccaaacatgagttttggacctaaagtagtggattgggcatgttcgttgcgaaaaacgaagaaatggttccggttgcaaaaactcgttctttgtatgcacccgacacccgttttcggaatgggtgacgagcgacaacgaaattgcgcgaaaccaccccaaacatgagttttggacctaaagtagtggattgggtgatgaagacatccacactactgatacatctatgccaatacaagtaccaatttctggtcccattactcgcgctcgtgctcgtcaactcaaccatcaggtgattacactcttgagttcatgtccatcttatttagaccatggagacccgtgcactcttgttttgcttaggaaccagggagaagaccgaaagggaaaaggatttgaacatgctggattcggactgcagaagaacaccaacttgtgacggtcaccacggtcggctcggattggaatgttcaagcacaacatggaaagcttatcaagtctactttcatatggatccggaattatagtcatatctgttctgaggccgccgtaatcattgttttcttaccgagatattttctgccttttctgcccatggtgctgcgtcaccctattttggccaatgggtcgtgtatcaagttaggtccattagggacgcatcctagggttgcagcacgaccccaatacccttgtggtcgtcctcccatgtttatagaccccctagccgccaccaagaacagcgagttttgtttagatcaagtttagctctcgctacttgcttgcaagcgcgcgtgctagttcagccgcccgtcttcttgtcttcggaaccccaccatattggagtttgactttgaaacctacatttagatctggtaattcagtacttgttctacttgttcttgctagttcttcgattgcttgcaggacgagtgccctagtggccagggtgtcacgctccacaagatcgtgacagccataggaggtggtgtatcggttgctaaggcgcagcgtctttggaaggctgtagtcgggccgtgaacgtcgtctcctcccccaatcgagttattccacaccctctcatcgaaagatcgggcaatcacccaacgggtgcacatcagttggtaatcagagcaaggtttatcggtgagagatttacttttcttcgctgttttcttatctcctatagtccagaaaaagccaaaaaaatagtagattagttttaccgcaatcctataaaccattgagcatttactagtactacttagctagggcttgttgagtttttggttgcatcggttgtgtcgagttgctggtcttagtttattcctttagagttttgagttctaccacgttttggtcaccacgagatccaccatcaccataaacatctctggttcgtttttgctaccacg

SEQ ID NO: 230 - DNA, 1890 bp, Zea mays
  source: /note="Zea mays BAC clone full insert sequence contig bacm2.pk170.a08.fis37"
ttcttctcacacagaccaatcaacggtatctatcaccttgatggcaaagaatgctgcatatcttgaattgaaatcaaagcatccttgcataccaaggcgtaggcaacagtagtggaagcaaataattcattaacatcagtttttgtcgcaagcaagcaatgtcctttcaattttatcccatctttgttattaccaactgctttaatattcttgttgttctcagttttagctttggtagctttagcaacatcatcacgcacaatagcctcaggggacatgggaagcaaaataattttcttatcatggtgtatgagagaatattgatttgatctaccatgatgcatacaatctgaatcaaattgccatggtctacctagcagaatattacaagcatccataggcacaacatcacagtcaacaacatcacgatatgaaccaatagcaaaattaattcgtaccagcttggttaccttgaccttaccactattgttaagccattgaatgtgatatggatgcgggtgcggtttggtcgtaagtgcaagcttctccaccatgtcgctgctagccaagttgttgcagctacctccatcaatgatcaaacgacatgaacgctccttaatgacacactttgtttgaaacaacgtatgtcgctgattctgctctgccttctccatttgtgcactaagcacacgctgtacaatgaggctctcataatgctctgcatcatctgcaccaatctgttcttcgggtggttccttagtgcctgcatcatcagccgcaagcaaagcaagtgtagcttcatccaaatcactagcagaggaatacccaccatcgtcttttaccaccaaaacacgctgattaggacaatcacgctgcacgtgtccatagcccttgcatcgataacacagaacatctcttgttctacccgtggaggctactgaagaggcaatacctgctggtttctgggcagatttggttgctgaatttgtggaagatgcacgtggtttgtcgccggaggaaggcgggggtgctggtcgacttggcgagggagttggtgctggtgtacgaccggtcacggacgtagtcgtgcgctgttgccatggtgtagattttcctgcagaaacattagaccttgcactagcacgtcgtccctgcacttccctttcagctttgcaagcaagatgaaacaatcgggttacattagcataatctttataagcaaggatgtcctgaatttccctatttaacctgcccaaaaatctagccatagcagattcctcaccctcctctatgttacaacgcagcatacccatttgtaattcctgataatattcttctacacttttagtaccctgtctcaattgttgcaacttgtttaacatatcacgtgcataataagaaggaacaaatctagcccgcatgacccgtttcaacgcatcccaagtttgtggcatgttattaggattcttcttaccatgttctatccaccaaacagaagcaaattcagtaaactcactagtagaagctctaacccgcgcattctcaggaaattcatggcatgcaaacttttgatcaaccgcaatctcccaagtaatgtaagcatcagggtcatatttaccatcaaaaggaggtattttaaatttaaccttactaaaagcatcatcattaccatgtacctcacgtcggcgaaaaccacccatacctctacggttagtacgtagtcaccggcgattaggtgcttcttggtcatcttgttcagtatcagcaacatagtcatcccagttaccttcggcgccctcatcacgcccaccattggtattatcatgcatctcatcaaatcgcctcaagagtgcgaccaggctcttgtcaatatgagcaactgtcatttcc

SEQ ID NO: 231 - DNA, 1748 bp, Zea mays
  source: /note="Zea mays BAC clone full insert sequence contig bacm2.pk170.a08.fis38"
gaaagtgctaggtgcattagttaacccaaaaggcatgactaaccactcagacaatccgaacttagttttgaaagcagttttccattcatctcccaatttcatacgaatctggtggtacccactacgcaaatcaactttagaaaagacaatggcaccactcaattcatcaagcatatcatctaaacgtggaatagggtgtcgataacgtatcgtgatattattaatagccctacaatcaacacacatacgccatgttccatcttttttaggcactaaaataaccggaacagcacacggactaagagactcacgcacgtaacctttgtcgagtagttcttgcacttgtcgctgaatttcttttgtttcctctggatttgtcctatatggcgcacgattcggcaaagatgcaccaggaataagatcaatttggtgctcaatccctcgtataggtggcagcccctctggtatctcacttggaaatacatcagaatactcctgcaaaatgttagtaataacaggaggcaaagaatgctgcatatcttgaattgaaatcaaagcatccttgcataccaaggcgtaggcaacagtagtggaagcaaataattcattaacatcagtttttgtagcaagcaagcaatgtcctttcaattttatcccatctttgttattaccaacagctttaatattcttgttgttctcagttttagctttggtagctttagcaacatcatcacgcacaatagcctcaggggacatgggaagcaaaataattttcttatcatggtgtatgagagaatattgatttgatctaccatgatgcatacaatctgaatcaaattgccatggtctacctagcagaatattacaagcatccataggcacaacatcacagtcaacaacatcacgatatgaaccaatagcaaaattatttcgtaccagcttggttaccttgaccttaccactattgttaagccattgaatgtgatatggatgcgggtgcggtttggtcgtaagtgcaagcttctccaccttgtcgctgctagccaagttgttgcagctacctccatcaatgatcaaacgacatatgtcgctgattctgctctgccttctccatttgtgcactaagcacacgctgtacaatgaggctctcataatgctctgcatcatctgcaccaatctgttcttcgggtggttccttagtgcctgcatcatcagccgcaagcaaagcaagtgtagcttcatccaaatcactagcagaggaatacccaccatcgtcttttaccaccaaaacacgctgattaggacaatcacgctgcacgtgtccatagcccttgcatcgataacacagaacatctcttgttctacccgtggaggctactgaagaggcactacctgctggtttctgggcagatttggttgctgaatttgtggaagatgcacgtggtttgtcgccggaggaaggcgggggtgctggtcgacttggcgagggagttggtgctggtgtacggccggtcatggacgtagtcgtgcgctgttgccatggtgtagattttcctgcagaaagattagaccttgcactagcacgtcgtccctgcacttccctttcagctttgcaagcaagatgaaacaatcgggttacattagcataatctttataagcaaggatgtcctgaatttccctatttaacccgcccaaaaatctagccatagcagattcctcaccctcctctatgttacaacgcagcata

SEQ ID NO: 232 - DNA, 2749 bp, Zea mays
  source: /note="Zea mays BAC clone full insert sequence contig bacm2.pk170.a08.fis39"
aaaatgcatcttttgtacacgacatgtctcgtttcttggttatgttgttactccacagggcattgaggtggatagcagcaagattgctgccactcgggagtggcctacaccgacgacggtcacacaaattcggagctttcttggacttgccggtttctaccgcagatttgttcgtgattttagctccattgcagcgcctcgacatgagcttacaaagaaagatgtgccatttgcttggagtgattcataggaggaagcgttcagcactttgaaagataagttaacccaagctcccctattgcaattgcctgattttaataaagtatttgagcttgaatgcgatgctagcggtattgggctaggtgctgttttgttataagaaggataaccagttgcttattttagtgaaaaattaagcggtgctagtctgaaatattctacttatgataaggagctttacactttagtgcgcactttgcatacatggcagcactatctttggcatcgtgagttcataattcattctgatcatgaggctttaaaacatattcatacccaaacaaatctgaaccgtcgtcatgctaaatgggtcgaattcattgagtcctttccttacattattaaacacaagaacgggaaggacaatgttattgctgatgctttgtctcgtcgctataccatgctgtcacaattagattttaaaatctttggtttggacactatgaaggatcaatatgttgacgatgctgattttaaagatgctttcggccattgtattaatgggataccatggggcaaatttcacatacaggatgggttcctgtttcgcgctaacaagctgtgtgttccagctagctcggttcgtcttttgttgttacaagaggcacatggaggcggtctcatggggcattttggcgtctacaaaacgcatgaggtgttggctgcccacttcttttggcctcggatgcgcgctgatgttgagcgccttgttgcacgctgcactacttgtcagaaagctaagtcacggttgaacaaccatggtttgtatatgcctttgcctgtcccttcttctctatggactttgttttgggcttgcctagaactaagaaggggagggatagtatttttgtggttgttgatagattctctaaaatggctcactttataccttgtcataaaactgatgatgctagcattgttgctgaattgttctttagagaaattattcgtttacatggtattccaaaaacaatattctctgatcgcgatgctaagtttctaagccatttttggagatctctttggaataaattgggaactaaattgttgtttagcactacttgtcatcctcagactgatggacaaactgaggtagtaaatagaactttatctaccatgcttagggctgttttagacaagaatttgagacgttgggaggatggcttgcctcatgttgaatttgcttacaatcatgccacgcattcttctacaaagatgtgccctttccagattgtttatggttacatccctagggcacctattgatttgatttcacttaatgctgcgaacgccccacatgtagatgatgctgcacatgttgaacaaatgattaccatacatgaacaaacgaaacagaacattgctgctactaatgcaaaaatcaggttgctggtagtaaaggaagaaaacatgttacttttgagccaggtgatatggtttggttgcacttgagaaaggatcggtttcctactttgcgccgttcaaaattaatgcctcgtgctgctggtccttttaaggtgctaacaaagattaatgctaatgcttatatccttgacctgcctgcggaatttggtgtttccactagttttaatgttgcagatttgaaaccatatatggcagaggttgaggagttgccgtcgaggacgacttcacttcaagaaggggaggatgatgaggacatcacctgcaacatgagtacgactacaccagcagcacctccacattaagccccacttccttcattagctggcccaatcactcgggcctgtgccagagatcttaacttcgtcatgctactgaagaatgagggcccagaagaatagacgaccagcccaactgcggcccatagtggacaacctagggttggccgcccctaggggtgcacgccctctctctatttatctaggagctccgcctcctttgttcttcaagttttgttttacgttagctttagctactctcgaacacgcgcaaatcagcgctgtcttcgtgtattcagaactccaccctcgagtaatagattagattgctcgcacctttttcttgttcgttcttcgattgcgcactggaaacgatcttcgtgatcaggccgatctcgcatcagcaaggtcggtaaccacaaggagttggttcagcgattgcattggcgcctcgggcttgctcgtcgtagtcggatcgcaagggtcatcttccgccaaatcggaattatctccactccccgaaagatcgggcacctcagctatatcaccaggtcgtcattcctttaaataccgctatgaaccgcagcgaggtattcactattttccagtgagctcggtcgaatccaaaattcgcagtgtctcctcttccactacccaaattggtagtgcacggtgaatttgtagtcctttgtggccgtatagccctgacgtgaccccctgtttccaccgaaaaccatcgagacacccatttcccctcatcggaacccgca

SEQ ID NO: 233 - DNA, 2448 bp, Zea mays
  VARIATION (755)..(755): /replace="c" or "g" or "t"
  misc_feature (755): /note="Nucleotide given in the sequence has no preference with respect to those in the annotation for said position"
  VARIATION (2405)..(2405): /replace="c" or "g" or "t"
  misc_feature (2405): /note="Nucleotide given in the sequence has no preference with respect to those in the annotation for said position"
  source: /note="Zea mays BAC clone full insert sequence contig bacm2.pk170.a08.fis40"
caataacaaagagcatgcttccataggaataacatcgcaatcagcataatcagaataagaacccagcgaaaaggggacacgtaccgaacgtgttacctttattttaccaccatcattaagccattgaatgtgatacggatgtggatgtgtgtgagtgggcaaggataatttctctaccaacgatgtacttgccaaattgttgcagctgccactatcgatgatgatgcgaatcgaccgttcgtgcacgacgcccttggtatggaatagagtgtgtcgctgatttttttcggcctgggcaacctgtgtgctgagaacacgctgcacaacaagactctcatacctatcggcgtcgatgggatcaacgtggacttcctcattttctgcatggttagtggcaatcatagcatgcctagtttcctcagaatcactggctgaagagtactcaccattgtcacgtataagcaaggtacgcttgtttgggcagtcccgaatcatgtgcccaaaccctctgcaacgatggcactgaatatcccgtgtacgtcctgtggaagaagcggcgcctttggcagggggcgccactggcttggtcgtccctgtgcgcgatgtagtgctaggcgtagaaggtgcagggctggaaggagttgagctgtgtgttggaccccggcctgcaaaagagttagtatatgtctttgatcgtcgtccctgcacttcacgttcagctttgcaagcatattcaaacaatgtggttatatcaaaataatcccttataatcaagtatatcctgaatttccctgttcaaaccaccacgaaaacgcgccatagcagcatcatccgactcaaccaaaccacaacgaagcatacccttttgtaactcctggtaatattcctcaacagatagtgaaccttgttgaaaacgctgcattttgttaagcaaatcacgagcataataggaaggaacaaatctgtagcgcatggtagtttttaattgggtccaagtaatgacactgttaatgggaagtttttgtttatactcacgccaccaaattaaagcaaaatcagtaaattcactaatggcagccttcacttggctattagcaggaatatcatggcatgaaaatttctgttctacctccaattcccaatcaagatatgcagcaggatcatatttaccattaaaagatggaattttaaatttaatcttagaaaataagtcattagggggatgacgaaccacacgacgtgcacgaccacggcgatctccatcgtcctgctcactgtcaccgccgtattcctgctccatctttgtggtcaatgcatcaaggcgtgccaggatggtgtcgagtgtggtgcgagtcgccgtttgagcaaggtcaagttggttgaaacgctcggtcgtcgaagtgatcgttgaatcaagccgttcatgcatcgtcctaatgtcagcagcaagtccatcaacttgtccccttacttcctgcaactgggcatccaccatgtcgtgtgctcctgccatagttagcgcaaacaccaaaacaccaaaaggagaaaaaccaacgacaaaaacaggggtgtactgctaacaaggcgctcacactagtgctgttatcaagttcttatccgttcttaccaagccacagtggtgaactgcaaccaacaggtggaaccggtgaaagattggatgagcgattgcctggagaaacagaaaccttctcgtcgtagaaagatgtggagttttgggtaggctgcactcaagtcaaggattagcacgatcaaacaataatgcaaagttgaattatagtgcaaaacacgaaaactatattgctggccacaagtgcaaaggacggatggaactagcagaatggcagtaccgtaaatattgtactagcgagaccactagagtgattttgtttttcttttttgtatgatttttttgatatttttctcagcacaagaagcaacaaaataggagctacacgaagtttcacctaaaacagaaatcagatgtggtctacagaaaatcaggaagttctctgaaaagcgtgcgagaactttgatgaatttttttctttattttcctgaatttttttgacaattttgtcgaaccccaaacagaccgtaggtgtgtttggccggcctcagaatggtgtcaacaagctcctgtaaaaatttcagattttttggacacccgagcgaaaagtatgcccgttttacggaaggtacctcaagttatgttttaaaaacgaccgggatgaaacaaccgtatcctttctccctcattttcttttttttctgttttttttgagtaaccgaagaagaaaacaaggaagtgggcgttgagtcgggttgttttttttccgtttttttccgaacccgaagagaaaaacaggaaaggtcgttgacccggattggtttttccgttttttttacgtacccgaggaggaaaacaag

SEQ ID NO: 234 - DNA, 3782 bp, Zea mays
  source: /note="Zea mays BAC clone full insert sequence contig bacm2.pk170.a08.fis41"
aaaactaattctacctatttttttggcttttttctgggcctttaggggataacaaaaacagcgaaggaaaagttaatctcttcaccgataaaaccttgctctgatttcccacctgatgtggccccgttgggtgattgcccgatctttcgatgagaagggtgtggaataactcgattggggaaggagacgatgttcacggcccgactacagccttcaaaagacgctgcgccttagcaaccgatacaccacctcctatggctgtcacgatcttgtggagcgtgacaccctggccactagggcactcgtcctgcaagcaatcaaagaactagcaagaacaagtagaacaagtactgaattaccagatctaaatgtaggtttcaaaatcaaactccaatatggtggggttccgaagacaagaagacgggcggctgaaccagcacgcgcgcttacaagcaagtagcgagagctaaacttgatctaaacaaaacccgatgttcttggtggcggctagggggtttataaacatgggaggacgaccacaagggtattggggtcgtgctgcaaccctaggatgcgtccctaatggacctaacttgatacacgacccattgggccaaaatagggtgacgcagcaccatgggcagaaaaggcaggaaatgtctcggtaagaaaacaatgattacagcggcctcagaacagatatgactataattccggatccatatgaaagtagacttgataagctttccatgttgtgcttgaacattccaatccgagcccgcatctgaccgtggtgaccgtcacaagttggtgttcttctgcagtccgaatccagcatgttcaaatccttttccctttcggtcttctccctgattcctaagcaaaacaagagtgcacgggtctccatggtctaaatatgatggacatgaactcaagagtgtaatcacctgatggttgagttgacgagcacgagcgcgagtaataggaccagaaattggtacttgtattggtatagatgcatcagtagtgtggatgtcttcatcagcacgtcacacattccgaaaacgggttgtcggggtgcatacaaagcacgagtttttgccaccggaaccatttcttcgtttttcgcaacgaacatgcccaatccactactttaggtccaaaactcatgtttggggttgtttcgcgcaatttcgttatcgcacgtcacacattccgaaaacgggttgtcggggtgcatacaaagcacgagtttttgccaccgggaccatttcttcgtttttcgcaacgaacatgcccaatccactactttaggtccaaaactcatgtttgggatggtttcgcgcaatttcgttgtcgcacgtcacacattccgaaaacgggtgtcgggtgcatacaaagcacgagtttttgccagcggaaccatttcgtcgtttttcgcaacgaacatgcccaatcaactagtttaggtccaaaactaatgctgaggtggtttcgcgcaatttcgttgtcgcacgtcacccattctgaaaacgggtatcgaggtgcataaaagcacgagtttttgccatcggaaccatttcttcgtttttcgcaacgaacatgcccaatccactaatttaggtccaaaactcatgtttggggtggtttcgcgcaatttcgttgtcgcacgtcacccattccgaaaacgggtgtcgggtgcacaaagcacgagtttttgccaccggaaccatttcttcgtttttcgcaacgaacatgcccaatccactactttaggtccaaaactcatgtttggggtggtttcgcgcaatttcgttgtcgcacgtcacacattccgaaaacgggtgtcggggtgcatacaaagcacaagtttttgccagcggatccatttcttcgtttttcgcaacgaacatgcccaatccactactttaggtccaaaactcatgtttgaggtggtttcacgcaatttcgttgtcgcacgttgatgaggacatcactatgagtacgactacaccagcagcacctacacatcaagcgccacttccttcattagctgggccaatcactcgggcccgtgccaaagatcttaacatcgtcatgctactgaagaatgagggcccagaagaatagacgaccagcccaactgcggcccatagtggacgacctaggttggccgcccctaggggctgcgccccctctatttatccaggagctgcgcctcctttatttttgagttttgttttacgttagctttagctactctcgaactcgcgcaaatctgcgctgtcttcgtgtattcagaactccaccctcgagtaatagattggattgctcgcatctttttcttgttcgttcttcgattgcgcacaggaaacgatcttcgtgatcaggccgatctcgcatcagcaaggtcggtaaccacagggagttggttcagcgattgcattagcgcctcgggcttgctcgtcgtagtcggatcgcaagggtcatcttccgccaaaccggaattatctctactcgccgaaagatcgggcacctcagctacatcaattaccaatagctttaatattcttgttgttctcagttttagctttgttagctttagcaacatcatcacgcacaatagcctcaggggacgtgggaagcaaaataattttcttatcatggtgtatgagagaatattgatttgatctaccatgatgcatacaatctgaatcaaattgccatggtctacctagcagaaaattacaagcatccataggcacaacatcacagtcaacaacatcacgatatgaaccaatagcaaaattaattcgtaccagcttggttaccttgaccttaccactattgttgagccattgaatgtgatatggatgcgggtgtggtttgatcgtaagtgcaagcttctccaccatgtcgctgctagccaagttgttgcagctacctccatcaatgatcaaacgacatgaacgctccttaatgacacactttgtttgaaacaacgtatgtcgctgattctgctctgccttctccatttgtgcactaagcacacgctgtacaatgaggctctcataatgctctgcatcagctgcaccaatctgttcttcgagtggttccttagtgcctgcatcatcagccgcaagcaaagcaagtgtagcttcatccaaatcactagcagaagaatacccaccatcgtcttttaccaccaaaacacgctgattaggacaatcacgctgcacgtgtccatagcccttgcatcgataacacagaacatctcttgttctacccgtggaggctactgaagaggcactacctgctggtttctgggcagatttggttgctgaatttgtggaagatgcacgtggtttgtcgccggaggaaggcgggggtgctggtcgacttggcgagggagttggtgctagtgtacgaccggtcatggacgtagtcgtgcgctgttgccatggtgtagattttcctgcagaaacattagaccttgcactagcacgtcgtccctgcacttccctttcagctttgcaagcaagatgaaacaatcgggttacattagcataatctttataagcaaggatgtcctgaatttccctatttaacccgcccaaaaatctagccatagcagattcctcaccctcctctatgttacaacgcagcatacccatttgtaattcctgataatattcttctacacttttagtaccctgtctcaattgttgcaacttgtttaacatatcacgtgcataataagaaggaaacaatctagcccgcat

SEQ ID NO: 235 - DNA, 2492 bp, Zea mays
  source: /note="Zea mays BAC clone full insert sequence contig bacm2.pk170.a08.fis42"
tccgaaaatgggtgtcggggtgcatacaaagcacgagtttttgccagcggaaccatttcttcgttttcgcaacgaacatgcccaatccactactttaggtccaaaactcatgtttgaggtggtttcgcgcaatttcgttgtcgcacgtcacccattctgaaaacaggtatcgaggtgcataaaagcacgagtttttgccaccggaaccatttcgtcgttttttgcaacgaacatgcccaatccactactttaggtccaaaactcatgtttggggtagtttcgcgcaatttcgttgtcacacgtcacccattccgaaaacaggtgtcggggtgcatacaaagcacgagtttttgccagcggaaccatttcttcgtttttcgcaacgaacatgcccaatccactactttaggtccagaactcatgtttgaggtggtttcacgcaatttcgttgccgcacgtcacccattctgaaaacaggtatcgaggtgcataaaagcacgagtttttgccaccggaaccatttcttcgtttttcgcaacgaacatgcccaatccactactttaggtccaaaactcatgtttggggtggtttcgcgcaatttcgttgtcgcacgtcacccattccgaaaatgggtgtcaggtgcatacaaagcacgagtttttgccaccggaaccatttcttcgtttttcgcaacgaacatgcccaatccactactttaggtccaaaactcatgtttggggtggtttcgcgcaatttcgttgtcgcacgtcacacattccgaaaatgggttgtcggggtgcatacaaagcacgagtttttgccaccggaaccatttcttcgttttttgcaacgaacatgcccaatccactactttaggtccaaaactcatgtttggggtggtttcgcgtaatttcattgtcgcacgtcacccattccgaaaacgggtgtcgggtgcatacaaagcacgagtttttgccaccggaaccatttcgtcgtttttcgcaacgaacatgcccaatccactactttaggtccaaaactcatgtttggggtggtttcgcgcaatttcgttgtcgcacgtcacccattccgaaaacgggtgtcgggtgcatacaaagcacgagtttttgccaccggaacatttcttcgtttttcgcaacgaacatgcccaatccactactttaggtccaaaactcatgtttggggtggtttcgcgcaatttcgttgccgcacgtcaccctccgaaaacgggtgtcgggtgcatacaaagcacgagtttttgccaccggaaccattttttcgtttttcgcaacgaacatgcccaatccactactttaggtccaaaactcatgtttggggtggtttcgcgcaatttcgttgtcgcacgtcacacattccgaaaacgggttgtcggggtgcatacaaagcacgagtttttgccaccggaaccatttcttcgttttttgcaacgaacattcccaatccactactttaggtccaaaactcatgtttggggtggtttcgcgcaatttcattatcgcacttcacccattccgaaaacgggtgtcgggtgcatacaaagcacgagtttttgccaccggaaccatttcgtcgtttttcgcaacgaacatgcccaatccactactttaggtccaaaactcatgtttggggtggtttcgcgcaatttcgttgtcgcacgtcacccattccgaaaacgggtgtcgggtgcagacaaagcacgagtttttgccaccggaacatttcttcgtttttcgcaacgaacatgcccaatccactactttaggtccaaaactcatgtttggggtggtttcgcgcaatttcgttgccgcacgtcaccctccgaaaacgggtgtcgggtgcatacaaagcacgagtttttgccaccggaaccattttttcgtttttcgctacgaacatgcccaatccactactttaggtccaaaactcatgtttggggtggtttcgcgcaatttcgttgtcgcacgtcacctatttcgaaaacgggtgtcggggtgcatacaaagcacgagtttttgccaccggaaccatttcttcgtttttttgcaacgaacatgcccaatccactactttaggtccaaaactcatgtttggggtggtttcgcgcaatttcgttgccgcacgtcacccattccaaaaacgggtgtcgggtgcatacaaagcgcgagtttttgccaccggaaccatttcttcgtttttcgcaacgaacatgcccaatccactactttagctccaaaactcatgtttggggtggtttcgcgcaatttcgttgtcgcacgtcacctattccgaaaacgggtgtcgggttgcatacaaagcacgagtttttaccagcgaaaccttttcttcgtttttcgcaaagaaaatgcccaatccactattttaggtccaaaactcatgtttggaggtggtttcgcgcaatttcgttgtcgcacgtcacctattctgaaaag

SEQ ID NO: 236 - DNA, 3585 bp, Zea mays
  source: /note="Zea mays BAC clone full insert sequence contig bacm2.pk170.a08.fis43"
cttggtgcgaggagagtgtggcatattacgagaagcatcatcaacctccaatcctgccataggtagacgaacagaggcaacaagaaaaaaaaacgtgaaggaatataaacactacaactattaggatgtagctactgcaaggcgctcactctcaacctgccagacaagctcttaccaattcttaccttgcacaacaggaggggtcagcaaccaacaagtctacaaccgtggaataagtgtatcggtgccgcagcaacacgacctgtcaaactgcagtcgaaatatgtagagttgtaggtgggctgaagcaaggaatacactagtaccacgttagttacaaaagcaagctgaataatcattcaacggtggtactgtgctggtcctaggctaaaccatgctatagacgtgagcctaggcacaaaggtagtcactgaaaaagaacaactagcacaacacaaagagaaacaacagatttagagattcagcccccttctttcttcttcttttctttttttttcttttcttttcttttctttttttcttcttttttttgcaggggcctaaaccctttttttcactatgacaacccaaacaataagtgatgaggacatcactatgagtacgactacaccagcagcacctccacatcaagcgccacttccttcattagctgggccaatcactcgggcccgtgccagagatcttaacttcgtcatgctactgaagaatgagggcccagaagaatagacgaccagcccaactgcggcccatagtggacgacctagggttggccgccccgaggggctgtgccccctctctctatttatataggagctgcgcctccctttgttcttcgagttttgttttacatctagctttagctaccccagaacacgcacaaatacgtgttgtcctctgtgattcagaactccacctcgagtgatattaaaattgctcgcatctttttcttgttcgttcttcgattgcgcacaggaaacgatcttcgtgatcaggccgatctcgcatcagcaaggtcggtaaccattggaagttggttcagcgattgcattggtgcttcaggatcgctcgtcgtagtcggatcgtgaggttctacttccaccaaatcggaattatctccactcaccgaaagatcgggcactccagctctatcaagtggtatcagatttccaggttgatcggtgagtttatcgagtgtttttttctcctacagtccacaaaaccacataaaaattcaggttagaccttataccagcacccttttgagcctcgcaccttctttcaataatctgcattgttgaatttgtgtgctttcgcgtcatttgttgctggtcgcattgtgtttttttctcaccatccttctttcttccttgtttttctccttcggttacatcaaaccctagcgcgccgcaaccatcttccttattgttctccttcggttacatcaaactctagcgcgccgcaaccatcttccttgtttctctccttcggttacatcaaaccgagtcaacgccgcttccttatttttctccttcggttacgtcaaaaaaaacagaaaaaaaacctagtcaacgccgcttccttgtttttctccttcggttacgtaaaaaaaacagaaacaaaaaaaaagaaaacgaaggagaaaggatacaaagcggttgtctcatctcgatcgttttaaacataccttccttaaaccggacataacttttcgctcggttgttcaaaaaatctgaaatttttacaggagcttgttggcaccattctgatccggcaaacggaccatcggtcggtttggtttcgacaaaattgtcaaaaaaaattcaggaaaataaagaaaaaaaatccgtcaaagttctcgtacgcttttcagagaacttcctgattttctgtagaccacatctgaactctgtttgaggtgaaatttcgtgtagctcctagtttgttgctccttgtgctgagaaaaatatcaaaaaaatcatacaaaaaaaagaaaaacaaaatcacatgtgattcctactagtgcctttttggcctcgctagtacaatatttacggtactgccattctgctagttccatccgtcctttgcacttgtgaccagcaatatagtttcgtgttttgcagtataattcaactttgcattattgtttgatcgtgctaatccttgacttgagtgcagcctacccaaaactccacatatttctacgacgagaaggtttctgtttctccaggcaatcgctcatccaatctttcaccggttccacctgttggttgcagttcaccactgtggcttggtaagaacggataagaatttgataacagcatttcattgagcgagttgtcaccaccatttccctattgtcgtcggtttttctccttttggtgttttggtgtttgcgctaactatggcaggagcacacgacacggtggatgcccagttgctggaagtaaggggacaagttgatggacttgctgctgacattaggatgatgcatgaacgacttgattcaacggtcacttcgacgaccgagcgtttcaaccagcttgaccttgctcaaacggcgactcgcaccacactcgacagcatcctggcacgccttgatgtgttgaccacaaagatggagcaggactacgtcggtgacactgagcaggacgatggggatcgtcgtggtcgtgcacgtcgtgtggttcgtcatccccctaatgacttattttctaagattaaatttaaaattccaccttttaatggcaaatatgatcctgctgcatatcttgattgggagttagaggttgaacaaaaattttcatgccatgatattgctgcacattctcaggttaaagctgctattagtgaatttactgattttgctttaatttggtggcgtgagtctaaaatgaaacatcccactgccattccaaccacttgggatcagttgaaagttgcgatgcgacatcgatttgtgccttcgtattatgctcgtgatttgcttaataaaatgcagcgttttcagcaaggttctcaatctgttgaggactatttccaggagttacaaaaaggtatgattcgatgtgggatattggaggacaacgacgctgttatggcacgttttcgtggtggtttaaaccgcgaaatctaggatatacttgattataaggaatattatgatatgactactttatttgaatatgcttgcaaagctgaacgtgaagtccagggacgccgctcgaagacatattctaacccttttgcaggacgaagctcgacatccacctcagcaccagttccccctgcgccatccacgtccaccactactccacgcgagaagatgaccaaaccagtcagcactgccccacccacaggtcgtacacgggatattcagtgtcatcgctgtagaggatttggccatgtgattcgagactgcccaaacaagcgcactttgctcattcatgacgatggtgagtactcttccgctagtgattctgaagaaattgaacatgcactacttgccactaaccatgaagctcaaacggaggtacatgtcaacccgggcgacgctgataggta

SEQ ID NO: 237 - DNA, 2331 bp, Zea mays
  source: /note="Zea mays BAC clone full insert sequence contig bacm2.pk170.a08.fis44"
ctaaagtttcttgctgctagagtttcgagttcgcgccaccttgtttagatcaccatttttagttctctagctgttctctaactgtagttcaaaaaaaacaagggaaaggaaaaaggcaagtgcacaaaaaaaagtcgcgctgatcataaaaaaaaagcacgtacaaaagagagagaaaaaaactacagtaagaatattggtagataaaattctatgtgcaacaaaaaaaagacagtttgtgtgccaccgtttcacaattttataagtcagcttgctgttttgagtatttggtgatatcatttgtgtaacggctcgcgtctctattacggttttggactaggaccagcacaacactattgtggaacgtttattcaacttgttgtggctaacgtggtactagctattccttggaactattgttttagcagccacctataaatccacaatttttttctacaacaccaccaggttgtgctagcagccactgttgctgttcttgctgtttgccagcgccacttgctttgcatggtgagaacttgtaagagcttgatttcttgctagtgaggtagtgtttatccatccacatcacagcaactactaggctgcattacttgtttttgtatctcttttgcactaaccatggcagaggatgcaaatgcgcgacctccacattctccacgaacagtgggcatcattcaacatttcgaacgtcaagtaaggttgcacacagatgccctcaatgaagatgttgaaatcaccaatgagcgcattggtcaattagaaacagcacaaattgttaccaacaacacattgaccactttggaacgaacagttgctgctactaacacctctcttgcagcaattattgagcgcttagataggatggaccaagttgggcgtgaaggtaggcaacaaggtgatgatgatggccatggttccattgctggtaccgcaagagatgatgctacggagtattcagcagacaccgagcatgatgaccgatctattaggcaccgacgacaccaatgacgtgatcgccatggcttgggtggtcgacctccgcgacgtgaggtacgtgaaaatgatgattctctaggaagaattaaattctccataccaccgtttgatggaaaatatgatcctgatgcatatctaacatgggaattgtcggtagatcaaaaatttgcatgctatgatttttctgatgataaaaaggttagagctgctacgagtgaattcactgattttgcttctatttggtggcatgagtaccaaactacacatccagctaccataccacaaacttggaatgctttaaaaagaatcatgcgtagtcgttttgttccttcctatcatgctcgtgatttattacataaattacaacagcttagacaaggcaacaaatctgttgaagagtattatcaacaattacaaataggcatgttgaggtgtggtctcgtagaaaatgaagaagctgcaatggctaggttcatgggtggtttgacaagagaaattcaggatatattagcttacaaggaatacactaatgttactcgcttatttcatcttgcttgtaaggctgaaagagaagtccagggacgatgcttgagaactaacacttatgtaggtcgcaatacatcttggcagccccgcactagtgctgctagctctaaccatgtgtttcagggagatgcttccaatagatcatccacaacaccatcgaaatcagcaccttctcgtgctattgagacagggaaaggatcctcccaagctgtaaccaaatcttcttctattgcttccacgggaagaacaaaggatatccaatgcctccaatgcaaaggatttgggcacatccgaagggattgcccaagcaagcgtgtgctaattataagagaaaatggtgagtactcatcagccagtgatttagataatgatacatatgccatgcttgctgcccaagatgctgaaaaggagaatgatgatgaagagcatattggggctgaacatgctgaacactatgagagcctcgttgtaagacgtgtcttgagtgcccaaattattaaagctgaacaaaaccagcgacacaatttgttccaaactaaatgtgtagttttggaacgatcttgtcgtattataattgatggaggaagctgcaacaacttagcaagcaccaccatggtagagaagcttgggctgaaaacgcttccacatccacacccctactacatccaatggttcaacgacagtggtaagcttaaggtaacacgtatggtccgtgtggaatttacaattggttcataccatgattatattgattgtgatgtggtacct

SEQ ID NO: 238 - DNA, 4940 bp, Zea mays
  VARIATION (836)..(836): /replace="c" or "g" or "t"
  misc_feature (836): /note="Nucleotide given in the sequence has no preference with respect to those in the annotation for said position"
  source: /note="Zea mays BAC clone full insert sequence contig bacm2.pk170.a08.fis45"
ccactactttaggtccaaaacacatgtttggggtggtttcgcgcaagttcattgtcgtacgtcacccattccgaaaacgggtgtcgggtgcatacaaagcacgagtttttgccaccggaaccatttcgtcatttttcgtaacgaacatgcccaatccactactttaggtccaaaacttatgtttggggtggtttcgcgcaatttcattgtcgcacgtcacccattccgaaaacgggtgtcgcgtgcatacaaagcacgagtttttgccagcggaacatttcttggtttttcgcaacgaacatgcccaatccactactttaggtccaaactcatgtttggggtggtttcgcgcaatttcgttgccgcacgtcacccattctggaaacaggtatcgaggtggataaaagcacgagtttttcccaccggaaccatttcttcgtttttcgcaacgaacatgcccaatccactactttaggtccaaaactaatgtttggggcggtttcgcgcaatttcattgtcgcacgtcacccattccgaaaacgggtgtcgggtgcatacaaagcacgagtttttgccaccggaacatttcatcgtttttcgcaacgaacatgcccaatccactactttaggtccaaaactcatgtttggggtggtttcgcgcaatttcgttgccgcacgtcaccctccgaaaatgggtgtcgggtgcatacaaagcacgagtttttgccaccagaaccattttttcgtttttcgcaacgaacatgcccaatccactactttaggtccaaaactcatgtttggggtggtgtcgcgcaatttcgttgtcgcacgtcacacatttcgaaaacgggtgtcggggtgcatacaaagcacgagtttttgccaccggaaccatttcttcgtttttttgcaacgaacatgcccaatccactactttaggtccaaaactcatgtttggggtggtttcgcgcaatttcgttgccgcacgtcacccattccgaaaacgggtgtcgggtgcatacaaagcgcgagtttttgccaccggaaccatttcgtcgtttttcgcaacgaacatgcccaatccactactttagctccaaaactcatgtttggggtggtttcgcgcaatttcgttgtcgcacgtcacctattccgaaaacgggtgtcggggtgcatacaaagcacgagtttttaccagcggaaccatttcttcgtttttcgcaacgaacatgcccaatccactactttaggtccaaaactcatgtttgaggtggtttcgcgcaatttcgttgtcgcacgtcacccattctgaaaacaggtatcgaggtgcataaaagcacgagtttttgccaccggaaccatttcttcgtttttcgcaacgaacatgcccaatccactactttaggtccaaaactcatgtttggggtggtttcgcgcaatttcgttgccgcacgtcacccattccgaaaacgggtgtcaggtgcatacaaagcacgagtttttgcgagcggaaccattttttcgtttttcgcaacgaacatgcccaatccactattttaggtccaaaactcatgtttggggtggtttcgcgcaatttcgttgtcgcacttcacccatttcgaaaacgggtgtcggggtgcacacaaagcacgagtttttgccagcggaaccatttcttcgtttttcgcaacgaacgtgcccaatccactactttaggtccaaaactcatgtttggggtggtttcgcgcaatttcgttgtcgcacgtcacccattccgaaaacgggtgtcaggtgcatacaaagcacgagtttttgccaccggaaccatttcttcgttttttgcaacgaacatgcccaatccaatactttaggtccaaaactcatgtttggggtggtttcgcgcaatttcgttgtcgcacgtcacacattccgaaaacgggtgttggggtgcacacaaagcacgagtttttgctagcgggaccatttcttcgttttttgcaacgaacatgcccaatccacaactttaggtccaaaactcatgtttgaggtggttttgcgcaatttcgttgtcgcacgtcacccattccgaaaacgggtgtcgggtgcatacaaagcacgagtttttgccaccggaaccatttcttcgttttcgcaaagaacatgcccaatccactactttaggtccaaaactcacgtttgggggtggttcgcgcaatttcgttgtcgcacgtcacacattccgaaaacgggttgtcgaggtgcatacacagctcgagtttttgccaccggaaccatttcttcgtttttcgcaacgaacatgcccaatccactactttaggtccaacactcatgtttggggtggtttcgcacaatttcgttgtcgcacgtcacccattccgaaaacgggtgttggggtgcatacaagcacgagtttttgccaccggaaccatttcttcgtttttcacaacgaacatgctcaatccactactttaggtccaaaactcatgtttggggttgtttcgcacaatttcgttgccgcacgtcacccattccgaaaacgggtgtcggggtgcattcaaagcacgagtttttgccaccgaaaccatttcttcatcgagaatcggaatcggtggaggatgtgcatagggtactccgagccctccccttatttagagaaatggaaggtatcttgcgtgagaggaacctgaatctcccgtcagtacaggaaataagcgctttccgtgtgaatctattctctggtatccggcgtgagagtgcgattgcggactagcgcacggtattcatatgagaaaaggttgttcgtggataacagttgtatttctttacttgacccgtacttccttcccttaacctgatccagctagtctttcctaagagataggaagccgagaaactaaacaggggatagctatcgagagaagcatcgaaagtatagaaccccggagcgaggggaaggtcggatccttgaccgagagccatgcatacttttctgacctatgtatgcctttcctcgcctacttcgttcttgctttccaaagaaacttattttatacttgctgtggctaataccccataaattcattctgagcagagctttctagcagattgattgagctatgtaagagtaagtacgtgatgagaatcttgtcatcaaagtgaaagcacatctttgagagtttcatatattccaatatgaagtgaaagggagtcagaggttagcaaatccttatcaaggtgtcttcttttgactagcccatttttggcaacgaacatgcctaatccactactttaggttcaaaactcatgtttgggtggtttcgcgcaattttgttgccgcacatcagccattccaaaaacgggtgtcgaggtgcattcaaagcacgagtttttgccaccggaaccatttcttcttttttcgcaacgaacatgcccactaaactactttaggtccaaaactcttgtttggggtattttcgcgcaatttcgttgccgcacgtcacccattccgaaaaacggttgtcggggtgcattcaaagcacgagtttttgccaccagaaccatttcttcgtttttcgcaacgaacatgcccaatccactacttgatgagaacataacccgcacagatatggccatgataatggctcctgctacaaagacattgaggaacaaagaagttgattggggaccaagtaatgatatttccaacatttccaaccaagcaagcacatcatcaaatttaaagatatacttgggtgaggacgactctattacaagaaggggctatgatgaggacatcactgccatcgatacaaccacaccagcgacccccttcaccatttaatcatggaccagtgaaacgagtctgtgcacgtaaatttaattatcaggtgaactcgttccttgttgttgaagctaatcattccttaaatgaggtactaataccttgtgattactttattatgctaaggtgtttgggaggtgaaccatctagaatttgagaaggcaacaaggcaataaaagctgctccacttgaagggatttcgtaactgcagcaagtgcaagttgaagaggtcatatctttcaactcccaaggccaatgaaggcaaataagcacttgatggaaagcactcttcgtctacttcttggtggagaaagaatcaattagagataccaaatgaggcgtccagaaactgtcgagagaacttcttgactccaccagcccgagggaattcgtaactgcagcaagcaccatattaaatggagcatatatttcatctcccaaggttgtttagtgcaaataagtacttgttggaaagctctattcgtatactttctggcggctgaagaatcaatgggagaaatgatgtgcacccgttgggtgattgcccgatctttcgatgagagggtgtggaataactcgattgggggaggagacgacgttcacggcccgactacagccttccaaagacgctgcgccttagcaaccgatacaccacctcctatggctgtcacgatcttgtggagcgtgacaccctggccactagggcactcgtcctgcaagcaatcgaagaactagcaagaacaagtagaacaagtactgaattaccagatctaaatgtaggtttcaaaatcaaactccaatatggtggggttccgaagacaagaagacggacgactgaaccagcacgcgcgcttacaagcaagtagcgagagctaaacttgatctaaacaaaatccgctgttcttggtggtggctagggggtttataaacatgggaggacgaccacaagggtattggggtcgtgctgcaaccctaggatgcgtccctaatggacccaacttgatacacgacccattgggcccaaaatagggtcacggagcacccatggcagaaaagcaggaaatgtctcggtaaggaa

SEQ ID NO: 239 - DNA, 5565 bp, Zea mays
  source: /note="Zea mays BAC clone full insert sequence contig bacm2.pk170.a08.fis46"
gcactaaagcgtaaagctccttatcataagtagaatattttagactagcaccgcttaatttttcactaaagtaagcaactggttttccttcttgtaacaaaacagcacctagcccaataccgctagcatcgcattcaagctcaaaaactttattaaaatcaggcaattgcaagaggggagcttgggttaacttatctttcaaagtgctgaatgctacctcctgcgaatcactccaagcaaacggcacatctttctttgtaagctcatgtagaggcgctgcaatggagctaaaatcacgaacaaatctgcggtagaaaccggcaagtccaagaaagctccgaatttgtgtgaccgtcgtcggtgtaggccactcccgaatggcagcaatcttgctgctatccacctcaatgccctgtggagtaaccacataaccaagaaacgagacacgttgcgtgcaaaatgtgcacttttctatgttaccaaacaagcgagcagcacgcaaagcatcaaaaacagcacgcaaatgttctaaatgctcctctatagacttgctgtaaataaggatatcatcgaaataaacaacaacaaacaaacctatgaaggcccgtagaacttcgttcattaaacgcataaaggtgctgggagcattagtcaatccaaatggcataaccaaccattcatataaaccaaatttcgttttaaaagccgttttccattcatcaccgagtttcattctaatctgatggtaaccgctacgcaaatcaaccttagagaaaataacggcaccactaagctcatctaacatatcatcaaggcgtggaataggatatcgataacgaactgtgatgttattaatagcacgacaatctatgcacatacgccatgacccatctttctttggaacgagtaaaacaggaaccgagcaagggctaagagagtcacgaatgtaacccttatcaagcagcgtctgcacctggcgctggatctccttcgtctcctctggatttgtacggtacggggcgcggttcggaagtgaaccaccggggatgagatcggtctgatgctcaatgccacggaggggaggaagacccggtggtaagtccgtaggataaacatcagcatacttctgcaaaaggttaacaacagcagggggtatatccaaagacggtgcatcatcaagcggaacaagcatgcgcgagcatacaagtgcataacagggcatatgagcttcatggagatcatcaaaatcagcacgtgtagcaagtaaaaccgagagtgcaacctgatttcagatttataggtgcggctgatgtcgatttgacttgttgtgcagttttagcagccctagtaagatcatctttcaaaatttggtcaggggtcattggatgtataattattttctggcctttaaacatgaaagaataatgatttgaacgaccatgatgtaaactatcagtatcatattgccaaggtcgacccaataacaaagagcatgcttccataggaataacatcgcaatcagcataatcagaataagaacccagcgaaaaggggacacataccgaacgtgttacctttattttaccaccatcattaagccattgaatgtgatacggatgtgggtgtgtgcgagtgggcaaggataatttctctaccaacgctgtacttgccaaattgttgcagctgccactatcgatgatgatgcgaatcgaccgttcgtgcacaacgcccttggtatggaatagagtgtgtcgctgatttttttcggcctgggcaacctgtgtgctgagaacacgctgcacaacaagactctcatacctatcgacgtcgatgggaccaacgtggacttcctcattttctacatggttagtggcaatcatagcatgactagtttcctcagaatcactggctgaagagtactcaccattgtcacgtataagcaaggtacgcttgtttgggcagtcccgaatcatgtgcccaaaccctctgcaacgatggcactgaatatcccgtgtacgtcctgtggaagaagcggcgcctttggcaggggcgccactggcttggtcgtcccggtgcgcgatgtagtgctaggcgtagaaggtgcagggctggaaggagttgagttgtgtgtcggaccccggcctgcaaaagagttagtatatgtctttgatcgtcgtccctgcacttcacgttcagctttgcaagcatattcaaacaatgtggttatatcaatataatccttataataaagtatatcctgaatttccctgttcaaaccaccacgaaaacgcgccatagcagcgtcatccgactcaaccaaaccacaacgaagcatacccttttgtaactcctggtaatattcctcaacagatagtgaaccttgttgaaaacgctgcattttgttaagcaaatcacgagcataataggaaggaacaaatctgtagcgcatggcagtttttaattgggtccaagtaatgacactgttaatgggaagtttttgtttatactcacgccaccaaattaaagcaaaatcagtaaattcactaatggcagccttcacttggctattagcaggaatatcatggcatgaaaatttctgttctacctccaattcccaatcaagatatgcagcaggatcatatttaccattaaaagatggaattttaaatttaatctttgaaaataagtcattagggggatgacgaaccacacgacgtgcacgaccacgacgatctccatcgtcctgctcagtgtcaccgccgtattcctgctccatctttgtggtcaatgcatcaaggcgtgccaggatggtgtcgagtgtggtgcgagtcgccgtttgagcaaggtcaagttggttgaaacgctcggtcgtcgaagtgatcgttgaatcaagctgttcatgcatcgtcctaatgtcagcagcaagtccatcaacttgtccccttacttcctgcaactgggcatccaccatgtcgtgtgctcctgccatagttagcgcaaacaccaaaacaccaaaaggagaaaaaccaacgacaaaaacatgggtgtactgctcacaaggcgctcacactagtgctgttatcaagttcttatccgttcttaccaagccacagtggtgaactgcaaccaacaggtggaaccggtgaaagattggatgagcgattgcctggagaaacagaaaccttctcgtcgtagaaagatgtggagttttgggtaggctgcactcaagtcaaggattagcacgatcaaacaataatgcaaaattgaattatagtgcaaaacacgaaaactatattgctggccacaagtgcaaaggacggatggaactagcagaatggcagtaccgtaaatattgtactagcgagaccactagagtgattttgttttttcttttttgtatgatttttttgatatttttctcagcacaagaagcaacaaaataggagctacacgaagtttcacctaaaacagaaatcagatgtggtctacagaaaatcaggaagttctctaaaaagcgtgcgagaactttgatgaatttttttctttattttcctgaatttttttgacaattttgtcgaaccccaaacagaccgtaggtgtgtttggccggcctcagaatggtgtcaacaagctcctgtaaaaatttcagattttttggacacccgagcgaaaagttatgcccgttttacggaaggtacctcaagttatgttttaaaaacgaccgggatgaaacaaccgtatcctttctccttcattttctttttttctgttttttttgagtaaccgaaggagaaaaacaaggaagtggtcgttgagtcggtttgtttttttttctgttttttttcgtaaccgaaggagaaaaacaaggaaacggccgttgactcggtttgttttttctgtttttttttgacgtaaccgaaggagaaaaacaaggaaacgatgttgactcggtttgtggcgtgatcaaacgggagatggtggcggcgctagggtttgaatgatggaagaacacaatgcaaccagcaacaaatgacgtgaaagcacacaaattcaacaatgcagattattgaaagaaagtgcgaggctcaaaagggtgctgggataagatctaacctgaatttttatgtggttttgtggactgtaggaaaaaaacgctcgataaactcaccgatcaacctggaaatctgataccaattgatgtagctgaggtgcccgatctttcggcgagtagagataattccgatttggcggaagatgacccttgcgatccgactacgacgagcaagcccgaggcgccaatgcaatcgctgaaccaactccctgtggttaccgaccttgctgatgcgagatcggcctgatcacgaagatcgtttcctgtgcgcaatcgaagaacgaacaagaaaaagatgcgagcaatctaatctattactcgagggtggagttctgaatcacagaggacagcacgtatttgtacgtgttctggggtagctaaagctagatgtaaaacaaaactccaagaacaaagtaggcgcagctcctatataaatagagagagggggcgcagcccctaggggcggccaaccctaggtcgtccactatgggccgcggttgggctggtcgtctattcttctgggccctcattcttcagtagcatgacgaagttaagatctctggcacgggcccgggtgattggcccagctaatgaaggaagtggtgcttgatgtggaggtgctgctggtgtagtcgtactcatagtgatgtcctcatcatcctccccttcttgaagtgaagtcgtcctcgacggcaactcctcatcctcggccatatatggtttcaaatctgcaacattaaaactagtggaaacaccaaattccgcaggcaggtcaaggatataagcattatcattaatctttgttagcaccttaaaaggaccagcagcacgaggcattaatttagaacggcgcaaagtaggaaatcgatcctttctcaagtgcaaccaaaccatatcacctggctcaaaagtaacaagttttcttcctttactaccagcaatctgattttttgcattagtagcagcaatgttttgttgagtttgttcatggaggttaatcatttgttcaacatgtgcaacaacatctatgtgtggggcgtccgcagcatcaagcgaaaacaaagcaataggcaccctaggaatgtaaccataaacaatttgaaaagggcacatctttgtagaagaatgtgttgcatgattataagcaaactcaacatgaggcaagcaatcctcccaacgtttcaaatttttgtctaaaacagccctaagcatggtagacaaagttcgattaactacctcagtttgaccatcagtctgaggatgacaagtggtgctaaacagcaatttagttcccaatttattccacagagatctccaaaaatgactgagaaacttagcatcacgattcgagactattgtattgggaatatcgtgcaaacgaataatctctctaaaaaacaattcagcaacattgctagcatcatcagtcttatgacaaggtatgaaatgagcca

SEQ ID NO: 240 - DNA, 4594 bp, Zea mays
  source: /note="Zea mays BAC clone full insert sequence contig bacm2.pk170.a08.fis47"
gcgcgcatccgaggccaaaagaagtgggcagccaacacctcatgcgttttgtagacgccaaaatgccccgtgagaccgcctccatgcgcttcctgtaacaacaaaagacgaaccgagctagctggaacacacagcttgttagcgcgaaacaggaacccatcctgtatgtgaaatttgccccatggtatcccattaatacaatggccgaaagcatctttaaaatcagcatcgtcaacacattgatccttcacagtgtccaaaccaaagattttaaaatctaattgtgacataatggtatagcgacgagacaaagcatcagcaataacattgtacttcccgttcttgtgtttaataatgtaaggaaaggactcaatgaattcgacccatttagcatgatgacggttcagatttgtttgggtacgaatatgttttaaagcctcatgatcagaacgaattatgaactcacgatgccgaagatagtgctgccatgtatgcaaagtgcacactaaagcgtaaagctccttatcataagtagaatatttcagactagtaccgcttaatttttcactaaaataaacaactggttttccttcttgtaacaaaacatcacctaaaccaataccgctagcatcgcattcaagctcaaaaactttattaaaattaggcaattgcaagaggggagcttgggttaacttatctttcaaagtgttgaacgctacctcctgcgaatcactccaagcaaacggcacatctttctttgtaagctcatgtagaggcgctgcaatggagctaaaatcacgaacaaatctgcggtagaaatcggcaagtccaagaaagctccgaatttgtgtgaccgtcgtcggtgtaggccactcccgaatggcagcaatcttgctgctatccacctcaatgccctgcggagtaaccacataaccaagaaacgagacacgttgcgtgcaaaatgtgcacttttccatgttaccaaacaagcgagcagcacgcaaagcatcaaaaacagcacgcaaatgttctaaatgctcctctatagacttgctgtaaataaggatatcatcgaaataaacaacaacaaacaaacctatgaaggcccgtagaacttcgttcattaaacgcataaaggtgctaggagcattagtcaatccaaatggcataaccaaccattcatataaaccaaatttcgttttaaaggccgttttccattcgtcatcgagtttcattctaatctgatggtaaccgctacgcagatcaaccttagagaaaataacggcaccactaagctcatctaacatatcatcaaggcgtggaataggatatcgataacgaactgtgatgttattaatagcacgacaatctacgcacatacgccatgacccatctttctttggaacgagtaaaacaggaaccgagcaagggctaagagactcacgaatgtaacctttatcaagcagcgtttgcacctggcgctagatctccttcgtctcatctggatttgtacggtacggggcgcggttcagaagagaagcgccggggatgagatcgatctgatgctcaatgccacggaggggaggaacacccggtggtaagtccgtaggataaacatcagcatactcctgcaaaaggttaacaacagcagggggtatatccaaagacggtgcatcatcaagcggaacaagcatgcgcgagcatacaagtgcataacagggcatatgagcttcatggagatcatcaaaatcagcacgtgtagcaagtaaaacaggtgagtgcaacttgatttcagatttaataggtgcggctgatgttgatttgacttgttgtgcagttttagcagccctagtaagatcatctttcaaaatttggtcaggggccattggatgtataattattttctagcctttaaacatgaaagaataatgatttgaatgaccatgatgtaaactatcagtatcatattgccaaggtcgacccaataacaaagagcatgcttccataggaataacatcgcaatcagcataatcagaataagaacccagcgaaaaggggacacgtaccgaacgtgttacctttattttaccaccatcattaagtcattgaatgtgatacggatgtgggtgtgtgcgagtgggcaaggataatttctctaccaacgctgtactggccaaattgttgcagctgccactatcgatgatgatgcgaatcgaccgttcgtgcacaacgcccttggtatggaatagagtgtgtcgctgatttgtttcggcctgggcaacctgtgtgctgagaacacgctgcacaacaagactctcatacctatcggcgtcgatgggatcaatgtggacttcctcattttctgcatggttagtggcaatcatagcatgactagtttcctcagaatcactggctgaagagtactcaccattgtcacgtataagcaaggtacgcttgtttgggcagtcccgaatcatgtgcccaaaccctctgcaacgatggcactgaatatcccgtgtacgtcctgtggaagaagcggcgcctttggcagggggcgccactggcttggtcgtccctatgcgcggtgtagtgctaggagtagaaggtgcagagctggaaggaattgagctgtgtgtcggaccccggcctgcaaaagagttagtatatgcctttgatcgtcgtccctgcacttcacgttcagctttgcaagcatattcaaacaatgtggttatatcaaaataatccttataatcaagtatatcctgaatttccctattcaaaccaccacgaaaacgagccatagcagcgtcatccgactcaaccaaaccacaacgaagcattttgtaactcttggtaatattcctcaacagattgtgaaccttgttgaaaacgctgcattttgttaagcaaatcacgagcataataggaaggaacaaatctgtggcgcatggcagtttttaattgggtccaagtagtgacactattaatgggaagtttttgtttatactcacgccaccaaattaaagcaaaatcggtaaattcactaatggcagccttcacttggctattagcaggaatattatggcatgaaaatttctgttctacctccaattcccaatcaagatatgcagtaggatcatatttaccattaaaagatggaattttaaatttaatcttagaaaataagtcattaggggtatgacgaaccacacggcgtgcacgaccacggcgatctccatcgtcctgctcagtgtcaccgccgtattcctgctccatcttggtggtcaacgcatcaaggcgtgccaggatggtgtcgagtgtggtgcgagtcgccgtttgagcaaggtcaagctggttgaaacgctcggtcgtcgaagtgaccgttgaatcaagccattcatgcatcgtcctaatgtcagcagcaagtccatcaacttgttcccttacttcctgcaactgggcatccaccatgccgtgtgctcctgccatagttagcgcaaacaccaaaacacaaaaaggagaaaaaaccgacgacaacaggggaatggtggtgacaacttgctcgctcaatggaatgctgttatcaagttcttatacgttcttacaaagccacagtggtgaactgcaatcaacaggtggaaccggtgaaagattggatgagcgattgcgtggagaaacagaaacctgctcgtcgtagaaatatgtggagttgtgggtaggctgcactcaagtcaaggataagcacgatcaaacaataatgcaaagttgaattatagtgcaaaacactaaactatattgctggccacaggtgcaaaggacggatggaactagcagaatggcagtaccgtaaatgttgtactagtgatgccaaaaaggcactagtaggaatcacaggtgattttgtttttcttttttgtatgatttttttgatatttatctcagcacaagaagcaacaagataggagctacacgaagtttcacctaaaacatatatcagatgtggtctatagaaaatcaggaagttctctgaaaagcgtgcgagaactttgacgaatttttttctttattttcctgaatttttttgaaaattttgtcgaaccccaaacagaccgtaggtgagtttggccggcctcagaatggtgtcaactagctcctgtaaaaatttcagattttttggacaaccgagcgaaaagttatgctcggtttaaggaaggtacctcaagttatgtgtaaaccgaccgagatgagacaaccgctttgtttccttcctttccctatttttttgtttgttctctggttctatcctttctctttctttttctttttttctttttttgtttctgtttttttacttaaccgaaggagaaaaacaaggaagcggcgttgactcggtttgtggcgttgaatcggtttgatgtaaccgaaggagagaaacaaggaagatggttgtgacgcgctagggtttgatgtaaccgaaggagaaaaacaaggaagatggttgcggcgcgctagggtttgatttagccgaaggagaaaaacaaggaagaagaaggatggtgagaaaaacacaatgcgaccaccccctcttcgtaaa

SEQ ID NO: 241 - DNA, 3292 bp, Zea mays
  source: /note="Zea mays BAC clone full insert sequence contig bacm2.pk170.a08.fis48"
ggagctacacgaagtttcacctaaaacagaggtcagatgtggtctacagaaatgaggaattctctgaaaagcgtgtgataactttgacaaatttttttctttattttcctgaatttttttgacaattttgtcgaaaccaaacagaccgaaggtgagtttggccggcctcagaatggtgtcaacaagctcctgtaaaaatttcagattttttggacaaccgagcgaaaagttatgcccggtttaagaaaagtacctcaagttatgtttaaaacgaccgagatgagtcaacaagttccttacttttttttgtttgttctctggttctatcctttctctttcattttctttttttttcttttgtttctgtttttttacgtaaccgaaggagaaaaacaaggaagcggcgttgactcggtttgttgtaaccgaacgagagaaacaaggaagatggttgcggcgcgctagggtttgatgtaaccgaaggacaaaaacaaggaagatggttgcggcgcgctagggtttgatgtaaccgaaggagaaaaacaaggaagaaagaaggatggcgagaaaaaaacacaatgcgaccagcaacaaatgacgcgaaagcacacaaattcaacaatgcagattattgaaagaaagtgcgaggctcaaaagggtgttggtatatggtctaacctgaacttttatgtggttttgtggactgtaggagaaaaaaacactcgataaactcaccgatcaacctggaaatctgataccaattgatatagctgaggtgcccgatctttcggcgagtagagataattccaatttggcgaaagatgacccttgcgatccgactacgacgagcaagcccgaggcgccaatgcaatcgctgaaccaactccctgtggttaccgaccttgctgatgcgagatcggcctgatcacgaagatcgtttcctgtgcgcaatcgaagaacgaacaagaaaaagatgcgagcaatctaatctattactcgagggtggagttctgaatacacgaggacagcgcagatttgcgcgtgttcgagagtagctaaagctaatgtaaaacaaaattccaaaacaaaggaggcgcagctcctggataaatagagaggggcgctgcccctaggggcggccaaccctaggtcgtccactatgggccgcagttgggctagtcgtctattcttctgggccctcattcttcagtagcatgacgaagttaagatctctggcacgggcccgagtgattggcccagctaatgaaggaagtggcgcttgatgtggaggtgctgctggtgtagtcgtactcatagtgatgtcctcatcaccattgtcacgtataagcaaggtacgcttgtttgggcagtcccgaatcatgtgctcaaaccctctgcaacgatggcattgaatatcccgtgtacgtcctgtggaagaaacgacgcctttggcagggggcgccgctggcttggccgtccctgtgcgcggtgatagagctggagtgcccgatctttcggtgagtggagataattccgatttggtggaagtagaccctcacgatccgactacgacgagcgaacccgaagcgccaatgcaatcactgaaccaactcccaatggttaccgaccttgctgatgcgagatcggcctgaccacgaagatcgtttcctgtgcgcaatcgaagaacgaacaagaaaaagatgcgagcaatcttaatatcactcgaggtggagttctgaatcacagaggacagcacatatttgtgcgtgttctggggtagctaaagctagatgtaaaacaaaactcgaggaacaaaggaggcgcagctcctggataaatagagagagggggcgcagcacctaggggcggccaaccctaggtcgtccactatgggccgcagttgggctggtcgtctattcttctaggccctcattcttcagtagcatgacgaagttaagatctctggcacgggcccgagtgattggcctagctaatgaaggaagtggcacttgatgtggaggtgctgctggtgtagtcgtactcatagtgatgtcctcatcatcctccccttcatgaagtgaagtcgtcctcgacggcaactcctcatcctcggccatatatggtttcaaatctgcaacattaaaactagtggaaacaccaaattccgcaggcaggtcaaggctataagcattatcattaatctttgttagcaccttaaaaggaccagcagcacgaggcattaatttagaatggcgcaaagtaggaaaccgatcctttctcaagtgcaaccaaaccatatcacctggctcaaaagtaacaagttttcttcctttactaccagcaacctgattttttgcattagtagcagcaatgttttgttgagtttgttcatggaggttaatcatttgttcaacatgtgcaacaacatctatgtgtggggcgtccgtagcatcaagcgaaaacaaagcaataggcgccctaggaatgtaaccataaacaatttgaaaagggcacaggaaacgatcttcgtgatcaggccgatctcgcatcagcaaggtcggtaaccacagggagttggttcagcgattgcattggcgcctcgggcttgctcgtcgtagtcggatcgcaagggtcatcttccgccaaatcggaattatctctactcgccgaaagatcgggcacctcagctacatcaattggtatcagatttccaggttgatcggtgagtttatcgagcgttttttttcctacagtccacaaaaccacataaaaattcaggttagatcttatcccagcacccttttgagcctcgcactttctttcaataatctgcattgttgaatttgtgtgctttcgcgtcatttgttgctggttgcattgtgttcttccatcattcaaacgctagcgccgccaccatctcccatttgatcacgccacaaaccgagtcaacatcgttttccttgtttttctcccttcgggttacgtaaaaaaaaacagaaaaaaacaaaccgaggtcaccgaccgtttccttggtttttctcctcgggttcgaaaaaaaacggaaaaaaaacaaaccgactcaacggacacctcccttggtttttctccctccgggttcctgcaaaaaaaccgggaaaaaaaagaaaattggggggaaaaggggaccggttgggtttcatccccgtccgtttttaaaaacaaaacttgggggggaaccttccggaaaaaagggggcttaactttttccccccgggggggcccccaaaaaaacctggaaattttttcaccgggg

SEQ ID NO: 242 - DNA, 15768 bp, Zea mays
  VARIATION (361)..(361): /replace="c" or "g" or "t"
  misc_feature (361): /note="Nucleotide given in the sequence has no preference with respect to those in the annotation for said position"
  VARIATION (15765)..(15765): /replace="c" or "g" or "t"
  misc_feature (15765): /note="Nucleotide given in the sequence has no preference with respect to those in the annotation for said position"
  source: /note="Zea mays BAC clone full insert sequence contig bacm2.pk170.a08.fis49"
ttgaacattccaatccgagccgaccgtggtgaccgtcacaagttggtgttcttctgcagtccgaatccagcatgttcaaatccttttccctttcggtcttctccctggttcctaagcaaaacaagagtgcacgggtctccatggtctaaataagatggacatgaactcaagagtgtaatcacctgatggttgagttgacgagcacgagcgcgagtaatgggaccagaaattggtacttgtattggcatagatgtatcagtagtgtggatgtcttcatcacccaatccactactttaggtccaaaactcatgtttggggtggtttcgcgcaatttcgttgtcgctcgtcacccattccgaaaacgggtgtcgggtgcatacaaagaacgagtttttgcaaccggaaccattttttcgtttttcgctacgaacatgcccaatccactactttaggtccaaaactcatgtttggggtggtttcgcgcaatttcgttgtcgcacgtcacctatttcgaaaacgggtgtcggggtgcatacaaagcacgagtttttgccaccggaaccatttcttcgtttttttgcaacgaacatgcccaatccactactttaggtccaaaactcatgtttggggtggtttcgcgcaatttcgttgccgcacgtcacccattctgatgaggacatcaacaccaacacgagcacatctacaccagcagcaccttctccagcccaggcaccatcttccccagtccaggcgccaccccttccacctgggccagtgactcgggcccgtgcaagagaattgaactacatcatgttgttaaagaacgaaggcccggaagaatagacgaccagcccaattgcggcccataatggacgacctagggttggccgcccctaggggctgcgccccctctctatttatacaggagctgcgcctcctttattttctgagttttgttttacattagctttagctactctcgaacacgcgcaaatctgcgctgtcttcgtgtattcagaactccaccctcgagtaatagattagattgctcgcatctttttcttgttcgttcttcgattgcgcacaggaaacgatcttcgtgatcaggccgatctcgcatcagcaaggtcggtaaccacagggagttggttcagcgattgcattggcgcctcgggcttgctcgtcgtagtcggatcgcaagggtcaacttccgccaaatcggaattatctctactcgccgaaagatcgggcacctcagttacatcaattggtatcagatttccaggttgatcggtgagtttatcgagtgttttttttcctacagtccacaaaacaacataaaaattcaggttagaccttatcccagcacccttttgagcctcgcactttctttcaataatctgcattgttgaatttgtgtgctttcgcgtcatttgttgctggttgcattgtgttcttccaccattcaaatcctagcgccgccaccatctcccctttgatcacgccacaaaccgagtcaacattgtttccttgtttttctccttcggttacgtcaaaaaaaacagaaaaaacaaaccgagtcaacggccgtttccttgtttttctccttcggttacgaaaaaaaaaacagaaaaaaaaaaccgagtcaacatcgtttccttgtttttctccttcggttacgtaaaaaaaacagaaacaaaaaacaacgaaggagaaaggatacggttgtttcatcccggtcgtttgaaaacataacttgaggtaccttccttaaaccgggcataacttttcgctcgggtgtccgaaaaatctgaaatttttacaggagctagttgacaccattctgaggccggccaaacttaccttcggtctgtttgggttcgacaaaattgtcaaaaaaattcaggaaaataaagaaaaaaatccgtcaaaattctcgcacgcttttcagagaactttctgattttctgtagaccacatttgaactctgttttaggtgaaacttcgtgtagctcctattttgttgcttcttgtgctgagaaaaatatcaaaaaaatcatacaaaaaagaaaaacaaaatcacttgtgattcctactagtggcctcgctagtacaatagttacggtactgccattctgctagttccattcgtcctttgcacttctggccagcaatatagtttcgtgttttgcactataattcaactttgcattattgtttggtcgtgctaatccttgacttgagtgcagcctacccacaactccacatatttctacgacgagtaggtttctgtttctccaggcaatcgctcatccaatctttcaccggttccacctgttggttgcagttcaccactgtggcttggtaagaacggataagaatttgataacagcagtagtgtgagcgccttgtgagcagtacacccctgtttttgtcgttttttttggtgttttggtgtttgcgctaactatggcaggagcacatgacacggtggatgcccagttgctggaagtaaagggacaagttgatggacttgctgatgacattaggacaatgcatgaacggcttgattcaacggtcacttcgacgaccgagcgtttcaaccagcttgaccttgctcaaacggcgactcgcaccacactcgacaccatcctggcacgccttgatgcgttgaccacaaagatggagcaggactacggcggtgacactgagtgggacgatggagatcgccgtggtcgtgcacgccgtgtggttcgtcatccccctaatgacttattttctaagattaaatttaaaattccatcttttaatggcaaatatgatcctgctgcatatcttgattgggagttagaggttgaacaaaaattttcatgccatgatattgctgcacattctcaggttaaagctgctattagtgaatttactgattttgctttaatttggtggcgtgagtttaaaataaaacatcccactaccattccaaccacttgggatcagttgaaagctgcgatgcgacattgatttgtgcattcgtattatgctcgtgatttgcttaataaaatgcagcgttttcagcaaggttctcaatctgttgaggactatttccaggagttacaaaaaggtatgattcgttgtgggatattggaggacaacgacgctgctatggcacgttttcgtggtggtttaaaccgcgaaatccaagatatacttgattataaggaatattatgatatgactactttatttgaatatgcttgcaaagctgaacgtgaagtgcagggacgccgctcgaagcaatattctaacccttttgcaggacgaagctcgacatccacctcagcaccagttccccctgcgccatccacgtccaccactactccacgcgagaagacgaccaaaccagccagcactgccccacccacaggtcgtacacgggatattcagtgtcatcgctgtagaggatttggccatgtgattcgggactgcccaaacaagcgcactttactcattcgtgacgatggtgagtactcttccgctagtgattctgaagaaattgaacatgcactacttgccactgaccatgcagctaaggcggaggtacatgtcaacccgggcgacgctgataggtatgaaagtcttgttgtgcagcgtgttctcagtacacaggtcgctttgcccgagaagaatcagcgacacactctgttccatacaaagggtgttgtgcaggagcggtcaattcgcatcattatcgacagcggcagttgcaacaatttggcgagtaccatgctggtcgaaaagttgtcgttacccactcgtaagcatccaaacccatatcacattcaatggcttaatgatggtggtaaaataaaaatcacgcgttccgtgcgagttcctttctccatgggtgcttattctgattttgttgattgtgatgttattcccatggaagcatgctctttgttacttggtcgaccttggcaatatgatactgatagcttgcatcatggtcgttcgaatcattattctttcatttttaagggtcagaaaataattatacatccaatgacacctgaacaaattgttaaagatgatcttgcccgagctgctataactgctaaacaacttgatccatcaccctctgtaccttctgaaattaagttgaaggctcctgttttacttgctacacgtgctgattttgatgatctacacggtgctcatttgccatgctatgcacttgtatgctctagtgtcctcatttcacttgatgatgcaccatctttggctattccccctatggttgctaaccttttgcaggagtacgctgatgtctttcccaaagacttaccaccgggtctcccaccgcttcgtggcattgagcaccagatcgacctcattcccggtgcacagcttccaaaccgcgcaccataccgtacaaatccggatgagacgaaggagattcagcgccaggtacaggcattgcttgacaaaggatacattcgtgagtctcttagcccttgctctgttcctgtgttacttgttcccaagaaggatgggtcatggcgtatgtgtgtagactgtcgtgctattaataatatcactattcgttatcgctatcctataccacgccttgatgatatgctagatgagcttagtggtgccattattttcactaagattgatttgcgtagtggttaccaccagattagaatgaaactgggtgatgaatggaaaacagccttcaaaacgaaatttggtttatatgaatggttggttatgccgtttggattgactaatgctcccagcacttttatgcgagtgatgaatgaagttttgaggcccttcataggattgtttgtggttgtttatttcgatgatatccttatttacagcaaatctaagaaagagcatttggaacatttaagagctgtttttgatgcattgcgtgccgcccagttattcgctaacatggaaaaatgcatcttttgcacacgacgtgtctcgtttcttggttatgttgttactccacagggcattgaggtggatagcagcaagattgctgccattcgggagtggcctacaccgacgacggtcacacaaattcggagctttcttggacttgccggtttctaccgcagatttgttcgtgattttagctccattgcagcgcctctacatgagcttacaaagaaagatgtgccgtttgcttggagtgattcgcaggaggaagcgttcagcactttgaaagataagttaacccaagctcccctattgcaattgcctgattttaataaagtatttgagcttgaatgcgatgctagcggtattgggctaggtgctgttttattacaagaaggaaaaccagttgcttattttagtgaaaaattaagcggtgctagtctgaaatattctacttatgataaggagctttacgcgttagtgcgcactttacatacatggcagcactatctttggcatcgtgagttcataattcattctgatcatgaggctttaaaacatattcgtacccaaacaaatctgaaccgtcgtcatgctaaatgggtagaattcattgagtcttttccttacattattaaacacaagcacgggaaggacaatattattgctgatgctttgtctcgtcgctataccatgctgtcacagttagattttaaaatctttggtttgcacactataaaagatcaatatgttgacgatgctgattttaaagatgctttcggccattgtattaatgggaaaccctggggcaaatttcacatacaggatgggttcctgtttcgcgctaacaagctgtgtgttccagctagctcggttcgtcttttgttgttacaggaagcacatggaggcggtctcatggggcactttggcgtctacaagacacatgaggtgttggctgcccacttcttttggcctcggatgcgcgctgatgttgagcgccttgttgcacgctgcactacttgtcagaaagctaagtcacggttgaacaaccatggtttgtatatgcctttgcctgttcctacttccccttggattgatatttcgatggattttattttgggattgcctagaactaagaaggggagggatagcatttttgtggttgttgatcgattctccaaaatggctcatttcataccttgtcataagactgatgatgctagcaatgttgctgaattgttttttagagagattattcgtttgcacggtattcccaatacaatagtctcggatcgtgatgccaagtttctgagtcatttttggagatctctgtggaataaattaggaactaaattgctgtttagcaccacttgtcaccctcagactgatggtcaaactgaggtagttaatcgaactttgtctaccatgcttagggctgttttagacaaaaatttgaaacgttgggaggattgcttacctcatgttgagtttgcttataatcatgcaacacattcttctacaaagatgtgcccttttcaaattgtttatggttacattcctagggcgcctattgctttgttttcgcttgatgctacggacgccccacacatagatgctcttgcacatgttgaacaaatgattaatctccatgaacaaactcaacaaaacattgctgctgctaatgctaaatatcagattactggtagtaaaggccggaaactagttacttttgaacctggtgatatggtttggttgcatttgagaaaggatcgttttcctactttgcgccgttctaaattgatgcctcgtgctgctggtccttttaaggtactaaccaagattaatgataatgcttatatccttgacctgcctgcggagtttggtgtttccactagttttaatgttgcagatttgaaaccgtatgcgggagaagatgaggagttgccgtcgaggacgacatcagttcaagaaggggaggatgatgaggacatcaacaccaacacgagcacatctacaccagcagcaccttctccagcccaggcaccatcttccccagtccaagcgccaccccttccacctgggccagtgactcgggcccgtgcaagagaattgaactacatcatgttgttaaagaacgaaggcccggaagaatagacgaccagcccaattgcggcccataatggacgacctagggttggccgcccctaggggctgcgccccctctctatttatacaggagctgcgcctcttttattttctgagttttgttttacattagctttagctactctcgaacacgcgcaaatctgcgctgtcttcgtgtattcagaactccaccctcgagtaatagattagattgctcgcatctttttcttgttcgttcttcgattgcgcacaggaaacgatcttcgtgatcaggccgatctcgcatcagcaaggtcggtaaccacagggagttggctcagcgattgcattggcgcctcgggcttgctcgtcgtagtcggatcgcaagggtcaacttccgccaaatcggaattatctctactcgccgaaagatcgggcacctcagttacatcacattccgaaaacgggtgtcgggtgcatacaaagcacgagtttttgccaccggaaccatttcgtcgttttttgcaacgaacatgcccaatccactactttaggtccaaaactcatgtttggggtggtttcgcgcaatttcgttgtcgcacgtcacttattccgaaaacgggtgtcggggtgcatacaaagcacgagtttttaccagcggaaccatttcttcgtttttcgcaaagaacatgcccaatccactactttaggtccaaaactcatgtttgaggtggtttcgcgcaatttcgttgtcgcacgtcacccattctgaaaacaggtatcgaggtgcataaaagcacgagtttttgccaccggaaccatttcttcgtttttcgtaacgaacatgcccaatccactactttaggtccaaaactcatgtttggggttgtttcgcgcaatttcgttgtcgcacgtcacacattccgaaaacgggttgtcggggtgcaaacaaagcacgagtttttgccaccggaaccatttcttcgtttttcgcaacgaacatgcccaatccacaactttaggtccaaaactcatgtttggggtggtttcgcgcaatttcgttgtcgcacgtcacacattccgaaaacgggtgtcgggtgcatacaaagcacgagtttttgccagcggaaccatttcgtcgtttttcgcaacgaacttgcccaatccactagtttaggtccaaaactcatgtttgaggtggtttcgcgcaatttcgttgtcgcacgtcacccattctgtaaacgggtatcgaggtgcataaaagcatgagttttttccatcggaaccatttcttcgtttttcgcaacgaacatgcccaatccactactttaggtccaaaactcatgtttggggtggtttcgcgcaatttcgttgtcgcacgtcacccattccgaaaacgggtgtcgggtgcatacaaagcacgagtttttgcgagcggaaccattttttcgtttttcgcaacgaacatgcccaatccactactttaggtccaaaactcatgtttggggtggtttcgcgcaatttcgttgtcgcacgtcacccatttcgaaaacgggtgtcgggggtgcatacaaagcacgagtttttgccaccggaaccatttcttcgtttttcgcaacgaacatgcccaatccactactttaggtccaaaactcatgtttggggtggtttcgcgcaatttcgttgtcgcacgtcacccattccgaaaacgggtgtcgggtgcatacaaagcacgagtttttgccaccggaaccatttcttcgtttttcgcaacgaatatgcccaatccactactttaggtccaaaactcatgtttggggtggcttcgcgcaatttcgttgtcgcacgtcacacatttcgaaaacgggttgtcgggggtgcatataaagcacgagtttttaccagcggaaccatttcttcgtttttcgcaacgaacatgcccaatccactactttaggtccaaaactcatgtttggggtggtttcgctcaatttcgttgtcgcacgtcacccattccgaaaacgggtgtcggggtgcatacaaagcacgagtttttggcagcggaaccatttcttcgtttttcgcaacgaacatgcccaatccactactttagatccaaaactcatgtttgaggtggtttcgcgcaatttcgttgtcgcacgtcacccattctgaaaacaggtatcgaggtgcataaaagcacgagtttttgccaccggaactatttcttcgtttttcgcaacgaacatgcccaatccactactttaggtccaaaactcatgtttggggtggtttcgcgcaatttcgttatcgcacgtcacccattccgaaaacgggtgtcgggtgcatacaaagcacgagtttttgcgatcggaaccattttttcgtttttcgcaacgaacatgcccaatccactactttaggtccaaaactcatgtttggggtggtttcgcgcaatttcgttgtcgcacgtcacccatttcgaaaacgggtgtcgaggtgcatacaaagcacgagtttttaccagcggaaccatttcttcgttcttcgcaacgaacatgcccagtccactactttaggtccaaaactcatgtttgaggtggtttcgcgcaatttcgttgtcgcacgtcacccattctgaaaacaggtatcgaggtgcataaaagcacgagtttttgcgaccggaaccattttttcgtttttcgcaacgaacatgcccaatccactactttaggtccaaaactcatgtttggggtggtttcgcgcaatttcgttgtcgcacgtcacccatttcgaaaacgggtgtcggggtgcatacaaagcacgagtttttaccagcggaaccatttcttcgtttttcgcaacgaacatgcccaatccactactttaggtccaaaactcatgtttgaggtggtttcgcgcaatttcgttgtcgcacgtcacccattctgaaaacaggtatcgaggtgcataaaagcacgagtttttgccgccggaaccatatcttcgtttttcgcaacgaacatgcccaatccacttttaggtccaaaactcatgtttggggtggtttcgcgcaatttcgttgtcgcacgtcacccattccgaaaacgggtgtcgggtgcatacaaagcacgagtttttgccaccggaaccatttctttgtttttcgcaacgaacatgcccaatccactactttaggtccaaaactcatgtttggggtggtttcgcgcaatttcgttgtcgcacgtcacacattccaaaaacgggtgtcggggtgcatacaaagcacgagtttttgccagcggaaccatttcttcgtttttcgcaacgaacatgcccaatccactactttaggtccaaaactcatatttggggtggtttcgcgcaatttcgttgtcacaagttacccatttcaaaaacgggtgtcggggtgcatacaaagcacgagtttttaccagcggaaccatttcttcgtttttcgcaacgaacatgcccaatccactactttaggtccaaaactcatgtttgaggtggtttcgcgcaatttcgttgtcgcacgtcacccattctgaaaacaggtatcgaggtgcataaaagcacgagtttttgccgccggaaccatatcttcgtttttcgcaacgaacatgcccaatccacttttaggtgcaaaactcatgtttggggggggtttcgcgcaaattcgttgtcgcacgtcacccattccgaaaacgggtgtcaggtgcatacaaagcacgagtttttgccaccggaaccatttcttcgtttttcgcaacgaatatgcccaatccactactttaggtccaaaactcatgtttggggtggtttcgcgcaatttcgttgtcgcacgtcacacatttcgaaaacgggttgtcgggggtgcatacaaagcacgagtttttaccagcggaaccatttcttcgtttttcgcaacgaagatgcccaatccactactttaggtccaaaactcatgtgtggggtggtttcgctcaatttcgttgtcgcacgtcacccattcagaaaacgggtgtcggggtgcatacaaagcacgagtttttgccagcggaaccatttcttcgtttttcgcaacgaacatgcccaatccactactttaggtccaaaactcatgtttgaggtggtttcgcgcaatttcgttgtcgcacgtcacccattctgaaaacaggtatcgaggtgcataaaagcacgagtttttgccaccggaaccatttcttcgtttttcgcaacgaacatgcccaatccactactttaggtccaaaactcatgtttggggtggtttcgcgcaatttcgttgtcgcacgtcacccattccgaaaacgggtgtcgggtgcatacaaagcacgagtttttgccaccggaaccatttcttcgtttttcgcaacgaacatgcccaatccactactttaggtccaaaactcatgtttggggtggtttcgcgcaatctcgttgtcgcacgtcacccattccgaaaacgggtgtcgggtgcacaaagcacgagtttttgccaccggaaccatttcttcgtttttcgcaacgaacatgcccaatccactactttaggtccaaaactcatgtttggggtggtttcgctcaatttcgttgtcgcacgtcacccattccgaaaacgggtgtcggggtgcacacaaagcacgagtttttgccagcggaaccatttcttcgtttttcgcaacgaacgtgcccaatccactactttaggtccaaaactcatgtttggggtggtttcacgcaatttcgttgtcgcacgtcacccattccgaaaacgggtgtcaggtgcatacaaagcacgagtttttgccaccggaaccatttcttcgttttttgcaacgaacatgcccaatccactactttaggtccaaaactcatgtttggggtggtttcgcgcaatttcgttgtcgcacgtcacacattccgaaaacgggtgtcggggtgcatacaaagcacgagtttttgtcagcggaaccatttcttcgtttttcgcaacgaacatgcccaatccactactttaggtccaaaactcatgtttggggtggtttcgcgcaatttcgttgtcgcacgtcacccattccgaaaacgggtgtcgggtgcatacaaagcccgagtttttgccaccggaaccatttcttcgttttttgcaacgaacatgcccaatccactactttaggtccaaaactcatgtttggggtggtttcgcgcaatttcgttgtcgcacgtcacacattccgaaaacgggttgtcggggtgcatacaaagcacgagtttttgccaccggaaccatttcttcgtttttcgcaacgaacatgctcaatccactactttaggtccaaaactcatgtttgaggtggtttcgcgcaattttgttgtcgcacgtcacacattccgaaaacgggtgtcggggtgcatacaaagcacgagtttttgtcagcggaaccatttcttcgtttttcgcaacgaacatgcccaatccactactttaggtccaaaactcatgtttgaggtggtttcgcgcaatttcgttgtcgcacgtcacccattctgaaaacaggtatcgaggtgcataaaagcacgagtttttgccaccggaaccatttcttcgtttttcgcaacgaacatgcccaatgatgtgcacccgttgggtgattgcccgatctttcgatgagagggtgtggaataactcgattgggggaggagacgacgttcacggcccgactacagccttccaaagacgctgcgccttagcaaccgatacaccacctgctatggctgtcacgatcttgtggagcgtgacaccctggccactagggcactcgtcctgcaagcaatcgaagaactagcaagaacaagtactgaattaccagatctaaatgtaggtttcaaagtcaaactccaatatggtggggttccgaagacaagaagacgggcggctgaactagcacgcgcgcttgcaagcaagtagcgagagctaaacttgatctaaacaaaacccgctgttcttggtggcggctagggggtctataaacatgggaggacgaccacaagggtattggggtcgtgctgcaaccctaggatgcgtccctaatggacctaacttgatacacgacccattgggccaaaatagggtgacgcagcaccatgggcagaaaaggcagaaaatatctcggtaagaaaacaatgattacggcggcctcagaacagatatgactataattccggatccatatgaaagtagacttgataagctttccatgttgtgcttgaacattccaatccgagcccgcatctgaccgtggtgaccttcacaagttggtgttcttctgcagtccgaatccagcatgttcaaatcctatttccctttcgatcttctccctggttcctaagcaaaacaagagtgcacgggtctccatggtctaaatatgatggacatgatctcaagagtgtaatcacctgatggttgagttgacgagcacgagcgcgagtaatgggaccagaaattggtacttgtattggcatagatgtatcagtagtgtggatgtcttcatcagttgccttctcaaattctagatggtttacctcccaaacaccttagcataataaagtaatcacaaggtattaatacctcatttaaggaatgattagcttcaacaacacggaacgagttcacctgatgattaaatttacgtgcacggactcgtttcactggtccatgattaaatggtgaagggggtcgctggtgtggttgtattgatggcagtgatgtcctcatcagaacatgcccaatccactactttaggtccaaaactcacgtttgcggtggtttcgcacaatttcgttgccgcaagtcacccattccgaaaacgggtgttgggtgcatacaagcacgagtttttgccaccagaaccatttcttcgtttttcgcaacgagcatgcccaatccactactttaggtccaaaactcatgtgtggggtcgttgcgcataatttcgttgccgcatgtcacccattccgaaaacggatgtcggtgtgcatacaaagcacgcgtatttgccaccggaactatttctttgttttttcgcaatgaacatgccaatccactactttaggtccaaaaacatgtttggagtgctttcgtgcaattttgttgcgacacgtcaccaattccgaaaacgggtgtcgggatgcaaacaagcacgagtttttgccaccggaacaatttcttcgcttttttgcaacgaacatgcccaatccacaactttaggtccaaaactcacgtttgggtggtttcacgcaatttcgttgccgcacgtcacccattcagaaaacggatgacggggtgcatacaaagcacgagtttttgctaccgtaaccatttcttcatttttcacaacgaacatgcccaatccactactttaggtccaaaactcatgtttggggtggtttcgcacaatttcattgtcgcacgtcacccattccgaaaacgggtgttggggtgcatttgaagcacgagattttgccatcgaaaccatttcttcatttttggcaacgaacatgcccaatccactactttaggttcaaaactcatgtttggggtagtttcgcgcaattttgttgccgcacgtcacacattccgaaaacgggtgttgaggtgcattcaaagcacgagtttttgccaccggaaccatttcttcttttttcgcaacgaacatgcccaatccactactttaggtccaaaactctttgataaccccaacgggtagaagggtgcccgatctttcgatgagagatgatggaggtggaaaacttgttggagaacgacgttggctgcccgactaccacaaccaagatggtgtggcaccttgagcgacaggtacaccgtctcctaataactacgatttggggtggaggtcgacgttgtgctatccgactacaacaaccacaagggtgctgcgccttagcgatagttacaccggctcctgttgttgctgctcttgccgtgccaagaacagccttgaacctgcaagcaatcgagaacaagcaagaacaagataaaaagcagacactcacggatctgatagagttggggttctgtttcaagtatccgggtggtctagccgacacacgcgtttacaaggaagtagcaaaggctaaacttacatcaaacaaaaacccaagttctttggtggctgctagttgcttaaatagaggaatagaaagaagttctggtggagaacgaagctctctcgacagtttctggacgtgtcgtttggtttctcccattgattcttcagccgccagaaagtagacgaagagagctttccaacaagtacttatttgcactaaacaaccttaggagatgaaagatatgctccatttaatatggtgcttgctgcagttacgaattccctcggactggtggagtcaagaagttctctcgacagtttctggacgcctcatttggtatctctaattgattctttctccaccaagaagtagacgaagagtgctttccatcaagtgcttatttgccttcattggccttgggagttgaaagatatggcctcttcaacttgcacttgctgcagttacaaaatcccatcaagtggagcagcttttattgccttgttgacttctcaaaat

SEQ ID NO: 243 - DNA, 742 bp, Zea mays
  VARIATION (1)..(1): /replace="c" or "g" or "t"
  misc_feature (1): /note="Nucleotide given in the sequence has no preference with respect to those in the annotation for said position"
  VARIATION (12)..(77): /replace="c" or "g" or "t"
  misc_feature (12)..(77): /note="Nucleotides given in the sequence have no preference with respect to those in the annotations for said positions"
  VARIATION (534)..(534): /replace="c" or "g" or "t"
  misc_feature (534): /note="Nucleotide given in the sequence has no preference with respect to those in the annotation for said position"
  VARIATION (576)..(576): /replace="c" or "g" or "t"
  misc_feature (576): /note="Nucleotide given in the sequence has no preference with respect to those in the annotation for said position"
  source: /note="Zea mays BAC clone full insert sequence contig bacb.pk243.l15.fis1"
agacccgtataaaaaaaaaaaaaaaaaaaaaaaaaaaaaaaaaaaaaaaaaaaaaaaaaaaaaaaaaaaaaaaaaaagcaaaagaggaactatggctcacatgttcagtgcttgtataattgtataatagaatctcattttcagctttacatgcaagcaaaaacaagtgagaaatgtgtttgtatgcttcatgcatgactatagtctgaatttcagaattgagtcctttcatgaacctagtcattacatcttccatgcattcatctaaacgagcaaacatggtacaaattttaaaatcatagtaataatctttcacagtcctagcaccctgctttaaggtgtctaatttagaaagcaaatgatcagcatagtatgcaggaatgaatgcatctctaaaatgaagtttgaagtcttcccaagattgtggaactttgttgtgcctacaaatgtatttccattccatcaatgcgtgctcagttaacaaattagaagcaatataaatcttttgtttttgagatagatcatgcttaccaaattccttatctacctttagctcccaatcaatgtatgcatgaagatcgaatttaccggtatatgaaggcaagtgtcgaatgatgccttgaatataatgttcggttggctcaaaaatctccatatcaactgccatgtttagtaaagacaagaaaaacattaaaatttctttggtcctattaactactaaggatcattggtggaaacccct

SEQ ID NO: 244 - DNA, 672 bp, Zea mays
  VARIATION (2)..(108): /replace="c" or "g" or "t"
  misc_feature (2)..(108): /note="Nucleotides given in the sequence have no preference with respect to those in the annotations for said positions"
  source: /note="Zea mays BAC clone full insert sequence contig bacb.pk243.l15.fis2"
aaaaaaaaaaaaaaaaaaaaaaaaaaaaaaaaaaaaaaaaaaaaaaaaaaaaaaaaaaaaaaaaaaaaaaaaaaaaaaaaaaaaaaaaaaaaaaaaaaaaaaaaaaaagaacatgcccaatccactactttgggtccaaaactcatatttggtgtgttttcgcgcaatttcgttgtcgtacgtcacccattcccaaaacgggtgtcgaggtgcatacaaagcacgacttttgccaccggaaccaattcttcgtttttttgcaacaaacatgcccaatccacttctttaggtccaaaactcatgtttggggtggttccgcgctatttcgttgccgcacgtcacccattccgaaaacgggggtcggggtgcatacaaagcacgagtttttgccaccggaaccatttcttcgtttttgcaacgaacatgccccatccactactttaagtccaaaactcatgtttgggtttgtttcgcgccaatttcgttgccgcccgggaacccattccgaaaaaacggtggtccggggtggatacaaaacaaagaattttttcccccccggaaaaccttttccttcgtttttttcccaaaaaaaaatgggcccaaaaccaactaattttttagggtccccaaaaaacccattttttgtggggggggggtttttccccccccaaa

SEQ ID NO: 245 - DNA, 695 bp, Zea mays
  VARIATION (1)..(1): /replace="c" or "g" or "t"
  misc_feature (1): /note="Nucleotide given in the sequence has no preference with respect to those in the annotation for said position"
  VARIATION (9)..(77): /replace="c" or "g" or "t"
  misc_feature (9)..(77): /note="Nucleotides given in the sequence have no preference with respect to those in the annotations for said positions"
  VARIATION (101)..(101): /replace="c" or "g" or "t"
  misc_feature (101): /note="Nucleotide given in the sequence has no preference with respect to those in the annotation for said position"
  VARIATION (394)..(394): /replace="c" or "g" or "t"
  misc_feature (394): /note="Nucleotide given in the sequence has no preference with respect to those in the annotation for said position"
  VARIATION (484)..(484): /replace="c" or "g" or "t"
  misc_feature (484): /note="Nucleotide given in the sequence has no preference with respect to those in the annotation for said position"
  source: /note="Zea mays BAC clone full insert sequence contig bacb.pk243.l15.fis3"
agacccgtaaaaaaaaaaaaaaaaaaaaaaaaaaaaaaaaaaaaaaaaaaaaaaaaaaaaaaaaaaaaaaaaaaaaactaaagtagtggattgggcatgtatcgttgcgaaaaacgaagaaatggtttcggtggcgaaaactcatgctttgtatgcatccgacacccgttttcggaattggtgacgtgcggcaacgaaattgcgcgaaaccaccccaaacatgagttttggacctaaagtagtggattgggcatgtttgttgcgaaaaacgaagaaatggttccggtggcgaaaactcgtgctttgtatccaccctgacacccgttttcggaatgggttccgtgcggcaacgaaattgcgcgaaaccaacccaaacatgagttttagacctaaagtagtggattgggcatgttcgttgcaaaaacgaagaaatgggtccggtggcaaaactcgtgctttgtatgcaccccgacccccgttttcagaaatgggtgacgtgccggcaccaaatagccgcggacccaccccaacatgagtttttgacctaaagaaatgggatgggccttgtggttgcaaaaaaaccaaaaatggtttccggtgggcaaatccgtgctttgaagcccccccaaccccctttttggaatgggtaaccttcccaaaacaaaattgccgaaaaccccccaaaaaaggatttg

SEQ ID NO: 246 - DNA, 647 bp, Zea mays
  VARIATION (7)..(106): /replace="c" or "g" or "t"
  misc_feature (7)..(106): /note="Nucleotides given in the sequence have no preference with respect to those in the annotations for said positions"
  VARIATION (474)..(474): /replace="c" or "g" or "t"
  misc_feature (474): /note="Nucleotide given in the sequence has no preference with respect to those in the annotation for said position"
  source: /note="Zea mays BAC clone full insert sequence contig bacb.pk243.l15.fis4"
atcgccaaaaaaaaaaaaaaaaaaaaaaaaaaaaaaaaaaaaaaaaaaaaaaaaaaaaaaaaaaaaaaaaaaaaaaaaaaaaaaaaaaaaaaaaaaaaaaaaaaaattgggtccaaaactaatgtttagtgtgttttcgcgcaatttcgttgtcgtatgtcacccattcccaaaacgggtgtcggggtgcatacaaagcacgacatttgccaccgaaaccaattcctcgtttttcgcaacgaacatgcccaatccacttctttaggtccaaaactcatgtttggtgtggtttcgcgctatttcgttaccgcacgtcacccattccgaaaacgggtgccggggtgcatacaaagcacgagtttttgccaccagaacgatttcttcgtttttcgcaacgaacatgcccaatccactactttaggtccaaaactcatgtttgggtgggtttcgcgcaatgtcgtttgccgcacgtcaaccccattccgaaaaacgggtgtcaaagttgggatacaaaaccaacgaagtttttcgcccacccggaaaaccaatttccctccgttttttttcgcaaacggaaaaaagggccccaaatcccaacctaacttttaagggtcccaaaaaacaccccaagggtttttgtggggggg

SEQ ID NO: 247 - DNA, 791 bp, Zea mays
  VARIATION (8)..(108): /replace="c" or "g" or "t"
  misc_feature (8)..(108): /note="Nucleotides given in the sequence have no preference with respect to those in the annotations for said positions"
  source: /note="Zea mays BAC clone full insert sequence contig bacb.pk243.l15.fis5"
aacgcataaaaaaaaaaaaaaaaaaaaaaaaaaaaaaaaaaaaaaaaaaaaaaaaaaaaaaaaaaaaaaaaaaaaaaaaaaaaaaaaaaaaaaaaaaaaaaaaaaaaacatctcctgtttgatcacgccacaaaaccgagtcaagatcgttttccttgtttttctccttcagttacgtaaaaaaacagaaaaaacaaaccgagtcaacggtcgtttccttgtttttctccttcggttacgaaaaaaacagaaaaaaaaaacaaaccgagtcaacggccgcttccttgtttttctccttcggttacgtcaaaaaaaaacagaaacaaaaaaaaagaaaacgaaggagaaaggatacggttgtttcatcccggtcgttttaaaacataacttgaggtaccttccgtaaaacgggcataactttttcgctcgggtgtccaaaaaatctgaaatttttacaggagcttgttgacaccattctgaggccggccaaactcacctacggtctgtttgggtttcgacaaaattgtcaaaaaaaattcaggaaaataaagaaaaaaattcatcaaagttctcgcacgcttttcagagaacttcctgattttctgtagaccacatctgaactctgtgttaggtgaaacttcgtgtagcttctattttgttgcttcttgtactgagaaaaatatcaaaaaaatcatacaaaaaaagaaaaacaaaatcacttgtgattcctactagtggcctcgctagtacaatatttacggtactgccattctgctagttccatttgtcct

SEQ ID NO: 248 - DNA, 795 bp, Zea mays
  VARIATION (1)..(109): /replace="c" or "g" or "t"
  misc_feature (1)..(109): /note="Nucleotides given in the sequence have no preference with respect to those in the annotations for said positions"
  VARIATION (757)..(757): /replace="c" or "g" or "t"
  misc_feature (757): /note="Nucleotide given in the sequence has no preference with respect to those in the annotation for said position"
  source: /note="Zea mays BAC clone full insert sequence contig bacb.pk243.l15.fis6"
aaaaaaaaaaaaaaaaaaaaaaaaaaaaaaaaaaaaaaaaaaaaaaaaaaaaaaaaaaaaaaaaaaaaaaaaaaaaaaaaaaaaaaaaaaaaaaaaaaaaaaaaaaaaaggtccaaaactcatgtttggggtggtttcgcgcaatttcgttgccgcacgtcaccgattccgagaacgggtgtcggggtgcacatgagttttcgccaccggaaccatttcttcatttttcgcaacgaacatgcccaatccactactttaggtccaaaactcatgtttgggtggtttcgcgcaatttcgttgccgcacgtcacccattccgaataccggtgtcggggtgcatacaaaacacgagtttttgccaccggaaccatttcttcctttttcgcaacgaacatgcccaatccactactttaggtccaaaactcatgtttggggtggtttcgcgcaatttcgttgtcatacgtcaccccattcccaaaacgggtgtcggggtgcatacaaagcacgagtttttgccaccggaaccatttcttcgtttttcgcaacgaacatgcccaatccactactttaggtccaaaactcatgtttggggtggtttcgcgcaatttcgttgtcatacgtcaccccattcccaaaacgggtgtcggggtgcatacaaagcacgagttttcgccaccggaactattcttcgtttttcgcacgaaattggctaatccactgctttaggcccaaaactcatgtttggggtggttttcgagcatatgttccccatttcaaaaagggtgggagggtggt

SEQ ID NO: 249 - DNA, 792 bp, Zea mays
  VARIATION (7)..(108): /replace="c" or "g" or "t"
  misc_feature (7)..(108): /note="Nucleotides given in the sequence have no preference with respect to those in the annotations for said positions"
  source: /note="Zea mays BAC clone full insert sequence contig bacb.pk243.l15.fis7"
atcgccaaaaaaaaaaaaaaaaaaaaaaaaaaaaaaaaaaaaaaaaaaaaaaaaaaaaaaaaaaaaaaaaaaaaaaaaaaaaaaaaaaaaaaaaaaaaaaaaaaaaaacatgagttttggacctaaagtagtggaatgggtatgttcgttgtgaaaaacgaagaaatggttccggtggcaaaaactcgtgcttgtatgcaccccgatacccgttttcggaatgggtaacgtgcggcaacgaaattgcgcgaaaccacccaaacatgagttttggacctaaaatagtggattgggcatgttcgttgggaaaaatgaagaaatagttccggtggcaaaaactcgtgctttgtatgcaccccaacacccgttttcggaatgggtgacgtgcggcaaccaaattgcgcgaaaccacccccaacatgaattttggaccttaaataatggattggcatgttcgttgcgaaaaaacaagaaatgggtccggtggcaaaaactcctgctttgtatgcacccccacacccgattttggaaagggtgacgtgtgggcccaaaactcccctgaaaccactattcggattgacattgtggatttggcaagttagttgcgaaaaaccaagaactggctcccgtggcgagaactcgtgcgttgtatgcaccccgacagccggcttagggatgagggtgacgtaggaatactaaattgctcgaaaactaccccaaacatgatttcaggaacctaaagtaggggactgggcatggtccttgccaaaaacaaaaaaataggctccgggg

SEQ ID NO: 250 - DNA, 712 bp, Zea mays
  VARIATION (1)..(1): /replace="c" or "g" or "t"
  misc_feature (1): /note="Nucleotide given in the sequence has no preference with respect to those in the annotation for said position"
  VARIATION (6)..(85): /replace="c" or "g" or "t"
  misc_feature (6)..(85): /note="Nucleotide given in the sequence has no preference with respect to those in the annotation for said position"
  VARIATION (506)..(506): /replace="c" or "g" or "t"
  misc_feature (506): /note="Nucleotide given in the sequence has no preference with respect to those in the annotation for said position"
  source: /note="Zea mays BAC clone full insert sequence contig bacb.pk243.l15.fis8"
aggacaaaaaaaaaaaaaaaaaaaaaaaaaaaaaaaaaaaaaaaaaaaaaaaaaaaaaaaaaaaaaaaaaaaaaaaaaaaaaaaattggctcaaaaatctccatatcacctgccatgttcagtaaagacaagaaaacaataaaaatatctttgatcctataaactactaggaatcattgttgtaatctctcattctcaaactggttaagcaagttcttacaaattctcaccacgcaatacaggaggtgccggcaaacagcaagaacaacaacaacggtggcagctagcacaacctggtggtgttgtagaaaaatttgtggatttataggtagctgcaatttcaatagttccaagaaatagctagtaccacgttagtcacaacaagttgaataaacgttctacaatggtgttgtgctggttctagtccaaaccgtaatagagacgcgagccgttacacaaatagtatcaccaaaaggtcagaacatcaatcggatttctgaaactaataaaaagaagcacaccaaactgccctttttgtttttgttggcaccttacaaaatttttatctacccaaaaaattcgaaacgggggttttttccccccccctttttttttggccccggggccctttttttttttgttttgggggaaaaaaaaggccggccttttttttaaagccaccccgcccccttttttggggttttcccccctt

SEQ ID NO: 251 - DNA, 802 bp, Zea mays
  VARIATION (1)..(105): /replace="c" or "g" or "t"
  misc_feature (1)..(105): /note="Nucleotides given in the sequence have no preference with respect to those in the annotations for said positions"
  source: /note="Zea mays BAC clone full insert sequence contig bacb.pk243.l15.fis9"
aaaaaaaaaaaaaaaaaaaaaaaaaaaaaaaaaaaaaaaaaaaaaaaaaaaaaaaaaaaaaaaaaaaaaaaaaaaaaaaaaaaaaaaaaaaaaaaaaaaaaaaaaaattgcgcgaaaccaccccaaacttgagttttggacctaaagtagtggattcggcatgttcgttgcgaaaaacgaagaaatggttccggtggcaaaaactcgtgcttgtatgcaccccgacacccgttttcggaattggtgacgtgcggcaacgaaattgcgcgaaaccaccccaaacatgagttttggacctaaagtagtggattgggcaagttcgttgcgaaaaacgaagaattggttccggtggcgaaacctcaagctttgtatgcaccccgacacccgttttcgaaatgggtgacgtgcggcaacgaaattgcgcaaaaccaccccaaacatgagttttggacctaaagtagtggaatgggaatgttcgttgtgaaaaactatgaaatggttccggtggcaaaaactcgtgcttgtatgcaccctaacaatcgtttttggaatgggtaacgtgcggcaacgaaattgcgcgaaaccaacccaaacatgagttttgtacctaaagtaatggattgggtatgttcgttgacaaaaacgaagaaatggttccggtgggcaaaactcgtgctttgtatgcaccccaacacccgttttttgaaagcgtgacgtccggcaacaaaattgcgcgaaaacaccccaaaaatgagttttggaacctaaagaactggaatgggcatgttcctttgccaaaaac

SEQ ID NO: 252 - DNA, 733 bp, Zea mays
  VARIATION (7)..(105): /replace="c" or "g" or "t"
  misc_feature (7)..(105): /note="Nucleotides given in the sequence have no preference with respect to those in the annotations for said positions"
  VARIATION (713)..(713): /replace="c" or "g" or "t"
  misc_feature (713): /note="Nucleotide given in the sequence has no preference with respect to those in the annotation for said position"
  source: /note="Zea mays BAC clone full insert sequence contig bacb.pk243.l15.fis10"
atcgccaaaaaaaaaaaaaaaaaaaaaaaaaaaaaaaaaaaaaaaaaaaaaaaaaaaaaaaaaaaaaaaaaaaaaaaaaaaaaaaaaaaaaaaaaaaaaaaaaaacatttctaaggttgtctattgtctcatggcaagtgcttagctcactagataatttttcacatttttcaatttctagagcataagcatttttaaccttaatgatgtgcacccgttgggtgattgcccgatctttcgatgagagggtgtggaataactcgattgggggagaagacgacgttcacggcccgactacagccttcccaagacgctgcgccttagcaaccgatacaccacctcctatgtctgtcacgatcttgtggggcgtgacaccctggccactagggcactcgtcctgcaagcaatcgaagaactagcaagaacaagtagaacaagtactgaattaccagatctaaatgtaggtttcaaaatcaaactccaatatggtggggttccgaagacaagaagacggacggctgactagcacgcgcgcttacaagcaagtagcgagagctaaacttgatctaaacaaaacccgcctgttcttggtggcggctaggggggtctataaacatgggaggacgaccacaagggtattggggtcgtgctgaaaccctaggatgcgtccctaatggacctaacttgatacacgacccattgggccaaaataaggtgacgcagcaccatgggc

SEQ ID NO: 253 - DNA, 696 bp, Zea mays
  VARIATION (37)..(37): /replace="c" or "g" or "t"
  misc_feature (37): /note="Nucleotide given in the sequence has no preference with respect to those in the annotation for said position"
  VARIATION (65)..(65): /replace="c" or "g" or "t"
  misc_feature (65): /note="Nucleotide given in the sequence has no preference with respect to those in the annotation for said position"
  source: /note="Zea mays BAC clone full insert sequence contig bacb.pk243.l15.fis11"
tgacgcgcgtatacgactcctataggggcgattgggaccttactcgccgctcgagtcgacggtaacttcagcttgatttgtatgcacccgacacccgttttcggaatgggtgacgtgcggcaacgaaattgcgcgaaaccaccccaaacacgagttttggacctaaagtagtggattggacttgttcgctgcgaaaaacgaagaaatggttccggtggcgaaaagtcatgctttgtatgcacccgacacccgttttcggaatgggtaacgtgcggcaacgaaattgcgcgaaagcaccccaaacatgagttttggacctaaagtagtgtattgagcatgttcgttgagaaaaacgaagaaatggttccagtggcgaaaactcgtgctttgtatgcaccccgacaccggttttcggaatgggtgacgtgcggcaacgaaattgcgcgaaaccaccccaaacatgagttttggacccaaagtagtggattgggcatgttcgttgcgaaaaacgaagaaatggttccggtggcgaaaactcgtgcttttaatgcacccgactaccgttttcggaatgggtgacgtgcggcaacgaaattgcgcgaaaccccccaaacgggatttttggacctaaatattcgaatggggatgtttgttgcgaaaaatgaaaaatggtttcggtggggaaaactcttggtt

SEQ ID NO: 254 - DNA, 728 bp, Zea mays
  VARIATION (1)..(1): /replace="c" or "g" or "t"
  misc_feature (1): /note="Nucleotide given in the sequence has no preference with respect to those in the annotation for said position"
  VARIATION (9)..(65): /replace="c" or "g" or "t"
  misc_feature (9)..(65): /note="Nucleotides given in the sequence have no preference with respect to those in the annotations for said positions"
  VARIATION (75)..(75): /replace="c" or "g" or "t"
  misc_feature (75): /note="Nucleotide given in the sequence has no preference with respect to those in the annotation for said position"
  VARIATION (80)..(80): /replace="c" or "g" or "t"
  misc_feature (80): /note="Nucleotide given in the sequence has no preference with respect to those in the annotation for said position"
  VARIATION (82)..(83): /replace="c" or "g" or "t"
  misc_feature (82)..(83): /note="Nucleotides given in the sequence have no preference with respect to those in the annotations for said positions"
  VARIATION (92)..(92): /replace="c" or "g" or "t"
  misc_feature (92): /note="Nucleotide given in the sequence has no preference with respect to those in the annotation for said position"
  VARIATION (95)..(95): /replace="c" or "g" or "t"
  misc_feature (95): /note="Nucleotide given in the sequence has no preference with respect to those in the annotation for said position"
  VARIATION (97)..(97): /replace="c" or "g" or "t"
  misc_feature (97): /note="Nucleotide given in the sequence has no preference with respect to those in the annotation for said position"
  VARIATION (99)..(100): /replace="c" or "g" or "t"
  misc_feature (99)..(100): /note="Nucleotides given in the sequence have no preference with respect to those in the annotations for said positions"
  VARIATION (102)..(103): /replace="c" or "g" or "t"
  misc_feature (102)..(103): /note="Nucleotides given in the sequence have no preference with respect to those in the annotations for said positions"
  VARIATION (105)..(105): /replace="c" or "g" or "t"
  misc_feature (105): /note="Nucleotide given in the sequence has no preference with respect to those in the annotation for said position"
  VARIATION (107)..(107): /replace="c" or "g" or "t"
  misc_feature (107): /note="Nucleotide given in the sequence has no preference with respect to those in the annotation for said position"
  VARIATION (109)..(109): /replace="c" or "g" or "t"
  misc_feature (109): /note="Nucleotide given in the sequence has no preference with respect to those in the annotation for said position"
  VARIATION (111)..(112): /replace="c" or "g" or "t"
  misc_feature (111)..(112): /note="Nucleotides given in the sequence have no preference with respect to those in the annotations for said positions"
  VARIATION (297)..(297): /replace="c" or "g" or "t"
  misc_feature (297): /note="Nucleotide given in the sequence has no preference with respect to those in the annotation for said position"
  source: /note="Zea mays BAC clone full insert sequence contig bacb.pk243.l15.fis12"
agacccgtaaaaaaaaaaaaaaaaaaaaaaaaaaaaaaaaaaaaaaaaaaaaaaaaaaaaaaaaatttcagcttagatgaaaagcgaaaccacaacaaaataacaaaaaaaacatgagttttggacataaagtagtggattgggcatgttcgttgcgaaaaacgaagaatgggttccggtggcaaaagttgtgctttgtattcacccagacacccgttttgggaatgggtgacgtgcggcaacgaaattgcgcgaaaccacgcaaacatgagttttggatctaaagtagtggaataagaaatgtcgttggcgaaaaatgaagaaatggtcccagtggcgaaaagtcatgcttttgggtgcccctcgacacccgtttttttggagataaatgaactgcccccaccaaaattggccgaaacccccccaaaatggatttttggaccaaagaattggattgggccattttcctttaaaaaaaaaaaaaaaagttttcggggaaaaaaacctcgcctttttttgccccccaaccccccttttttagaagggggggggtgggggcccaaaattttaaattttcctccgccccggggggaccccattttttataaggcggccccccccccggggggaccccccctttttttctcctttaaaaagagataattgcccccgggggaaaaaaaagggaaaaaattttttccgggggaaaaattccctcccccccaacc

SEQ ID NO: 255 - DNA, 789 bp, Zea mays
  VARIATION (1)..(1): /replace="c" or "g" or "t"
  misc_feature (1): /note="Nucleotide given in the sequence has no preference with respect to those in the annotation for said position"
  VARIATION (4)..(82): /replace="c" or "g" or "t"
  misc_feature (4)..(82): /note="Nucleotides given in the sequence have no preference with respect to those in the annotations for said positions"
  source: /note="Zea mays BAC clone full insert sequence contig bacb.pk243.l15.fis13"
agaaaaaaaaaaaaaaaaaaaaaaaaaaaaaaaaaaaaaaaaaaaaaaaaaaaaaaaaaaaaaaaaaaaaaaaaaaaaaaaaacccattccactactttaggtccaaaactcatgtgttggggtggttttgcgcaatttcgttgccgcacgtcacccattccgaaaacgggtgtcggggtgcatacaaaggttgagttttcgccaccagaaccatttcttcgtttttcccaacgaacatgcccaatccactactttaagtccaaaactcatgtttggtgtggtttcacgcaatttcgttgccgcacgttacccattccgaaaacgggtgtcggggtgcatacaaacacgagtttttgccaccggaaccatttcctcgtttttcacaacgaacatacccattccactactttaagtccaaaactcaagttttggggtggttttgcgcaatttctttgccgcacgtcacccattccaaaaacgggtgtccgggtgcatacaaaaaacgaatttttcccaccggaaccattttctttgtttttcccaacaaaaaggcccaatcccctaatttatgtccaaaactcaatatttggggtgggtttcccacaaattccttgacggcacgtaacaccattccaaaaacggtttcggggggcaaagaaacccccagatattccccaccggaacatattccttcatttttcccaacacacaaccccccaacataacaaattaaggcgccaaaaaacccctctttgggggcggttttgtgcggattattggggcggggg

SEQ ID NO: 256 - DNA, 766 bp, Zea mays
  VARIATION (5)..(103): /replace="c" or "g" or "t"
  misc_feature (5)..(103): /note="Nucleotides given in the sequence have no preference with respect to those in the annotations for said positions"
  VARIATION (761)..(761): /replace="c" or "g" or "t"
  misc_feature (761): /note="Nucleotide given in the sequence has no preference with respect to those in the annotation for said position"
  source: /note="Zea mays BAC clone full insert sequence contig bacb.pk243.l15.fis14"
atccaaaaaaaaaaaaaaaaaaaaaaaaaaaaaaaaaaaaaaaaaaaaaaaaaaaaaaaaaaaaaaaaaaaaaaaaaaaaaaaaaaaaaaaaaaaaaaaaaaatgcatagaatttctatttcatctagatatgttgtttcttcactttgtgcaaataatatattggtatgttctcaagaagaaaagaatctcttgtttccatgtactttagtagaagtttcaggtttatatttgaaagacattaataaaagcttagtcatcaacatcaatcatgatgcaaaaccaaggacggtttgctgtcaagaaggagagaatgatgagaacataacccgcacagatatgaccatgttaatggctcctgctacagagacattgaggaacaaagaagttgattggggaccaagtaatgatatttccaacatttccaacaaagcaagcacatcatcaaatttgaagatatacttgggtgaggagcatacactagagtcgaggacgactctattacaagaaggggaggatgatgaagacatcactggcatcaatacaccacaccagcgacccccttcaccatttaatcatggaccagtgaaacgagtccgtgaacgtaaatttaattatcaggtgaactcgttccttgttgttgaagctaatcattccttaaatgaggtactaataccttatgattactttattatgctaaggtgtttgggaagtgaacatctagaatttgagaaaagcacagggcaataaagctgctccaattgag

SEQ ID NO: 257 - DNA, 572 bp, Zea mays
  VARIATION (7)..(105): /replace="c" or "g" or "t"
  misc_feature (7)..(105): /note="Nucleotides given in the sequence have no preference with respect to those in the annotations for said positions"
  source: /note="Zea mays BAC clone full insert sequence contig bacb.pk243.l15.fis15"
atacccaaaaaaaaaaaaaaaaaaaaaaaaaaaaaaaaaaaaaaaaaaaaaaaaaaaaaaaaaaaaaaaaaaaaaaaaaaaaaaaaaaaaaaaaaaaaaaaaaaaatttcgttgcctcacgtcacccattccgaaaacgggtgtcggggtgcacataaagcacgagttctttccaccagaaccatttcttcgtttttctcaacgaacatgcccaatccactactttaggtccaaaactcatgtttggggtggtttcgcgcaatttcgttgcggcacgtcacttattccaaaaaacgggtgtcgaggtgcacacaaagcatgacttttcgccactggaaccatttcttcatttttcgcaacgaacattcctaatccactactttagatccaaaactcatgtttggcgtggtttcgcgcaatttcgttgccgcacgtcacccattcccaaaacgggtgtctgggtgaatacaaagcacaacttttgccaccggaacccattcttcgtttttcgcaacgaacatgcccaatccactactttatgtccaaaactcatgtttgatgtggtttcgctc

SEQ ID NO: 258 - DNA, 778 bp, Zea mays
  VARIATION (6)..(106): /replace="c" or "g" or "t"
  misc_feature (6)..(106): /note="Nucleotides given in the sequence have no preference with respect to those in the annotations for said positions"
  source: /note="Zea mays BAC clone full insert sequence contig bacb.pk243.l15.fis16"
tcgccaaaaaaaaaaaaaaaaaaaaaaaaaaaaaaaaaaaaaaaaaaaaaaaaaaaaaaaaaaaaaaaaaaaaaaaaaaaaaaaaaaaaaaaaaaaaaaaaaaaaaagcatattcaaataaagtagtcatatcataatattccttataatcaagtatatcctggatttcgcggtttaaaccaccacgaaaatgtgccgtagcagcgtcgttgtcctccaatatcccacaacgagtcatacctttttgtaactcctggaaatactcctcaacagattgagaaccttgctgaaaacgcttcattttattaagcaaatcacgagcataatatgaaggcacaaatcgatgtcgcatcgcagctttcaactgatcccaagtggttggaatggcagtgggatgttttattttatactcacgccaccaaattaaagcaaaatcagtaaattcactaatagcagctttaatctgagaatgtgcagcaatatcatggcatgaaaatttttgttcaacctctaactcccaatcaagatatgcagcaggatcatatttgccatgaaaaggtggaattttaaatttaatcttagaaaataagtcattagggggatgacgaaccacacggcatgcacgaccatggcgatctccatcgtcttgctcagtgtcaccgccgtagtcctgctccatctttgtggtcaacgcatcaaggcgtgccaggatggtgtcgagtgtggtgcgagtcgccgtttgagcaaggtcaagctggttgaaacgctcgatcgtcga

SEQ ID NO: 259 - DNA, 786 bp, Zea mays
  VARIATION (1)..(1): /replace="c" or "g" or "t"
  misc_feature (1): /note="Nucleotide given in the sequence has no preference with respect to those in the annotation for said position"
  VARIATION (4)..(80): /replace="c" or "g" or "t"
  misc_feature (4)..(80): /note="Nucleotides given in the sequence have no preference with respect to those in the annotations for said positions"
  source: /note="Zea mays BAC clone full insert sequence contig bacb.pk243.l15.fis17"
agaaaaaaaaaaaaaaaaaaaaaaaaaaaaaaaaaaaaaaaaaaaaaaaaaaaaaaaaaaaaaaaaaaaaaaaaaaaaaatacgtcaccccattcccaaaacgggtgtcggggtgcatacaaagcacgagtttttgccaccggaaccatttcttcgtttttcgcaacgaacatgcccaatccactactttaggtccaaaactcatgtttggggtggtttcgcgcaatttcgttgtcatacgtcaccccattcccaaaacgggtgtcggggtgcatacaaagcacgagtttttgccaccggaaccaattcttcgtttttcgcaacgaacttggcaaatccactgctttaggtccaatactcatgtttggggtggtttcgtgccatacgtcacccattccgaaaacgggtgtcggggtgcatacaaagcacgagtttttgcgaccggaaccatttcttcgtttttcgcaacgaacatgccaatccattactttaggtccaaaacatatgtttggggtgggttcccgcaaattctttgccgcacgtcaccccttccgaaaaagggtgttggggggctttccaagaacgagtatttgcccccggaacaatttcttcattttttccaagaaaatgcccaatccaataactttaggtgccaaaattagttgttaggggggggtttctcgccaattatcgttggcccccgtgttaaccccatcttaaaaaggggtgatcgggggtgcataacaaaccggacgttgttggctatctcgaacctttattctctcc

SEQ ID NO: 260 - DNA, 599 bp, Zea mays
  VARIATION (1)..(1): /replace="c" or "g" or "t"
  misc_feature (1): /note="Nucleotide given in the sequence has no preference with respect to those in the annotation for said position"
  VARIATION (5)..(39): /replace="c" or "g" or "t"
  misc_feature (5)..(39): /note="Nucleotides given in the sequence have no preference with respect to those in the annotations for said positions"
  VARIATION (54)..(82): /replace="c" or "g" or "t"
  misc_feature (54)..(82): /note="Nucleotides given in the sequence have no preference with respect to those in the annotations for said positions"
  source: /note="Zea mays BAC clone full insert sequence contig bacb.pk243.l15.fis18"
agacaaaaaaaaaaaaaaaaaaaaaaaaaaaaaaaaaaattctttaagctgcgaaaaaaaaaaaaaaaaaaaaaaaaaaaaatttgtgtgctttcgcgtcatttgttgctggttgcattgtgttcttccaccattcaaaccctagcgccgccaccatctcccctttgcgagtcaacatcgtttccttgtttttctccttcggttacgtcaaaaaaaaacagaaaaaacaaaccgagtcaacgggccgttttccttggttttttcccccttcgggtttccaaaaaaaaaaaaccggaaaaaaaaaaaccaaccccgagtcccaaaatttgggtttcccctggggtttttttccccccctccgggggttaaaccccccccaaaaaaaaaaaaccccgggaaaccccccaaaaaaacacccccccccccaaggggggaaaaaaaagggggccaacccgggggttgttttttatttccacccccccggggggttgtttttttaaaaaaaaaaaaaaaaaaatgtggggggggggggcccccccctttttttaaaaaaaaaggggggggggggaaaaaaaattttttttttctggcggcggggg

SEQ ID NO: 261 - DNA, 772 bp, Zea mays
  VARIATION (10)..(77): /replace="c" or "g" or "t"
  misc_feature (10)..(77): /note="Nucleotides given in the sequence have no preference with respect to those in the annotations for said positions"
  source: /note="Zea mays BAC clone full insert sequence contig bacb.pk243.l15.fis19"
tgacgccgtaaaaaaaaaaaaaaaaaaaaaaaaaaaaaaaaaaaaaaaaaaaaaaaaaaaaaaaaaaaaaaaaaaaatggacctaaagtagtggattggacttgttcgctgcgaaaaacgaagaaatggttccggtggcgaaaagtcatgctttgtatgcacccgacacccgctttcggaatgggtaacgtgcggcaacgaaattgcgcgaaaccaccccaaacatgagttttggacctaaagtagtggattgggcatgttcgttgagaaaaacgaagaaatggttccaatggcgaaaactcgtgctttgtatgcaccctgacaccagctttcggaatgggtgacgtgcggcaacgaaattgcgcgaaaccaccccaaacataagttttggacctaaagtagtggattgggcatgttcgttgcgaaaaacgaagaaatggttttggtggcaaaaactcgtgctttgtatgcaccccgacacccgttttcggaatgggtgacgtgcggcaacgaaatagtgcgaaacccaccaaacatgagttttggacctaaagtagtggattgggcatgttcgttgcgaaaaacgaagaaatggttccggtggcgaaaactcatgctttgtatgcatccgacacccgttttccgaattggtgacctgcggcaaccaaattgcgcgaaacacccccaaaattgagttttggacctaaaattattggattgggcatgttttgttgccaaaaaagaagaaaattggttcctggtggcgaaaacc

SEQ ID NO: 262 - DNA, 668 bp, Zea mays
  source: /note="Zea mays BAC clone full insert sequence contig bacb.pk243.l15.fis20"
caccggaaccatttcttcatttttcgcaacgaacatgcccaatccactactttaggtccaaaactcatgtttgggtggtttcgcgcaatttcgttgccgcacgtcacccattccgaatacgggtgtcggggtgcataaaagcacgagtttttgccaccggaaccatttcttcgtttttcgcaacgaacatgcccaatccactactttaggtccaaaactcatgtttggggtggtttcgctcaatttcgttgtcgtacgtcaccccattcccaaaacgggtgtcggggtgcatacaaagcacgagtttttgccaccggaaccaattcttcgtttttcgcaacgaacttgcccaatccactgctttaggtccaatactcatgtttggggtggtttcgtaccacacgtcacccattccgaaaacgggtgtcggggtgcatacaaagcacgagtttttgccaccggaaccatttcttcgtttttcgcaacgaacatgccaatccattactttaggtccaaaactcatgtttgcggtgatttctgcgcaatttcgttgccgcacgtcacccattccgaaaacgggtgtcggggtgcatacaaagcttgagtttttgccaccggaaccatttcttcgtttttcgcaatgaacatgcccaatccactactttagg

SEQ ID NO: 263 - DNA, 700 bp, Zea mays
  source: /note="Zea mays BAC clone full insert sequence contig bacb.pk243.l15.fis21"
gtgctcgtcaactcaaccatcaggtgcttacactcttgaatgcatgtccatcatatttagaccatggagacccgtgcactcttgttttgcttaggaaccagggagaagaccgaaagggaaaaggatttgaacatgctggattcggactgcagaagaacaccaaattgtgacggtcaccacggtcacatgcgggctcggattggaatgttcaagcacaacatggaaagcctatcaagtctactttcatatggatccggaattatagtcatatctgttctgaggccgccgtaatcattgtttccttacagagacatttcctgccttttctgcccatggtgctgtgtgaccctattttggcccaatgggtcgtgtatcaagttgggtccattagggacgcatcctagggttgcagcacgacccaaatacccttgtggtcgtcctcccatgtttataaaccccctagccgccaccaagaacagcgggtttttttagatcaagtttagctctcgctacttgcttgtaagcgcgcgtgctggttcagccgcccgtcttcttgtcttcggaaccccaccatattggagtttgattttgaaacctgcatttagatctggtaattcagtacttgttctacttgttcttgctagttcttcgattgcttgtaggacgagtgccctagtggccagggtgtcacgctccacaa

SEQ ID NO: 264 - DNA, 1075 bp, Zea mays
  source: /note="Zea mays BAC clone full insert sequence contig bacb.pk243.l15.fis22"
cgcaatttcgttgccgcacgttacccattccgaaaacgggtgtcggggtgcatacaagcacgagtttttgctaccggaaccgtttcttcgtttttcgcaacaaacatgcccaatccactactttaggtccaaaactcatgtttggggtggtttcgcgcaatttcgttgccgcacgtcacccattccgaaaacgggtgtcggatgcatgcaaagcatgagttttcgccaccggaaccatttcttcgtttttcgcaatgaacattcccaattgactactttaggtccaaaaatcatgtttggggtggtttcgcgcaatttcgttgccgcacgtcacccatccccaaaacggtagtcggggtgcattaaaagcatgagttttcgccaccggaaccacttcttcatttttcgcaacgaccatgcccaatccacaactttgggtccaaaactcatgtttggggtggtttcgcgcaatttcgttgccgcacgtcacccattccgaaaaccggtgtcggggtgcatacaaagcatgagttttcgccaccggaaccatttcttcgtttttcgcagcaaacaagcctaatccactactttaggtccaaaactcatgtttggggtggtttcccgcaatttcgatgccgcacgtcacccattccaaaaacgggtgtcgggtgcatacaaatcatgagttttcgccaccggaaccatttcttcgtttttcgcaacaaacatgcccaatccactactttaggtccaaaactcatgtttggggtggtttcgcgcaatttcgttgccgcacgtcacccattccgaaaacggtagtgggggtgcatacaaagcatgagttttcgccaccggaaccatttcttcgtttttcacaacgaacatgcccaatccactactttgggtccaaaactcatgtttggtgggttttcgcacaatttcgttgtcgtacgtcacccattcccaaaacgggtgtcggggtgcatacaaagcacgacttttgccaccggaaccaattcttcgtttttcgcaacgaacatgcccaatccacttctttaggtccaaaactcctgtt

SEQ ID NO: 265 - DNA, 872 bp, Zea mays
  source: /note="Zea mays BAC clone full insert sequence contig bacb.pk243.l15.fis23"
caacgaacatgcccaatccacttctttaggtccaaaactcctgtttgggctggttccgcgctatttcgttgccgcacgtcacccattccgaaaacgggggtcgaggtgcatacaaagcacgagtttttgccaccggaaccatttcttcgttttttgcaacgaacatgcccaatccactactttaggtccaaaactcatgtttgggttggtttcgcgcaatttcgttgccgcacggaacccattccgaaaacgggtgtcagggtggatacaaagcacgagttttcgccaccggaaccatttcttcgtttttcgcaatgaacatgcccaatccactactttaggtccaaaactcatgtttggggtggtttcgcgcaattttattgccgcacgtcacccattccgaaaacgggtgtcggggtgcatacaaaccacgagtttttgccacccggaaccatttcttcgttttcgcaacgaacatgcccaatccactactttgggtccaaaactcatgtttggtgtggtttcgcgctatatcgttgccgcacgtcacccattccgaaaacgggtgtcggggtgcatacaaagcatgagtttttgccaccggaaccatttcttcgtttttcgcaacgaacatgcccattccagtactttaggtccaaaactcatgtttggggtggtttcgcgcaacttcgttgccggacgtcacgcgttccaaaaacgggtgttggggtgcatacaaagcacgagtttttgccaccggaaccatttcttcgtttttctcaacgaacatacccaatccactactttaggtacaaaactcatgtttgggttggtttcgcgcaatttcgttgccgcacgttacccattccaaa

SEQ ID NO: 266 - DNA, 1007 bp, Zea mays
  VARIATION (745)..(745): /replace="c" or "g" or "t"
  misc_feature (745): /note="Nucleotide given in the sequence has no preference with respect to those in the annotation for said position"
  source: /note="Zea mays BAC clone full insert sequence contig bacb.pk243.l15.fis24"
ctactagtgagtttactgaatttgcttctgtttggtggatagaacatggtaagaagaatcctaataacatgccacaaacttgggatgcgttgaaacgggtcatgcgggctagatttgtcccttcttattatgcacgtgatatgctaaacaagttgcaacaattgagacagggtactaaaagtgtagaagaatattatcaggaattacaaatgggtatgctgcgttgtaacatagaggagggtgaggaatctgctatggctagatttttgggcgggttaaatagggaattcaggacatcattgcttataaagattatgctaatgtaacccgattgtttcatcttgcttgcaaagctgaaagggaagtgcagggacgacgtgctagtgcaaggtctaatgtttctgcaggaaaatctacaccatggcaacagcgcacgactacgtccatgaccggccgtacaccagcaccaactccctcgtcaagtcgaccagcaccaccgccttcctccggcgacaaaccacgtgcatcttccacaaattcagcaaccaaatctgcccagaaaccagcaggtagtgccttttcagtagcctccacgggtagaacaagagatgttctgtgttatcgatgcaagggctatggacacgtgcagcgtgattgtcctaatcagcgtgttttggtggtaaaagatgatggtgggtatttctctgctagtgatttggatgaagctacacttgctttgtttgcagctgatgattgcagccctaaagaacaccccgaaaaaaaatttggggccaattatcccaaacccttttaaaaccccctttttaaaaccttgtgcttttggcccaattgggaaaggcggaaaaaaaacccccgccaccctttttttttaaaaaaagggtggtttaaaaaaacaccccgccttgtaaccctgggggaggggcgcccaaaattttttgttacccccacggggggaaaaattttttttttaaaaaaccccccccccc

SEQ ID NO: 267 - DNA, 973 bp, Zea mays
  source: /note="Zea mays BAC clone full insert sequence contig bacb.pk243.l15.fis25"
cgtgaaaccacctcaaacatgagttttggtcctaaaatagtggattgggcatgttcgttgagaaaaacgaagaaatggttccggtggcgaaaactcatgctgtgtatgcaccccgacacccgttttcggaatgggtgacgtgcggcaacgaaattgcgcgaaaccaccccaaacatgatttttggacctaaagtagtggattgggcatgttcgttgcgaaaaacgaagaaatggttccggtggcgaaaactcatgctttgtatgcaccccaactcccgttttcggaatgggtgacgtgcggcaaagaaattgtgcgaaaccaccccaaacatgagttttagacctaaagtagtggattgggcatgttcgttgcgaaaaacgaagaaatggttctggtggcgaaaactcttgctttgtatgcaccccgacacccgttttcggaatgggtgacatgcatcaacgaaattgcgcgaaaccaccccaaacatgagttttcgacctaaagtagtggattgggcatgttcgttgcgaaaaacgaagaaaatggtcccggtggagctttgtatgcaccccgacacccgttttgggaatggggtgacgtatgacaacgaaattgcgcgaaaccaccccaaacatgagttttggacctaaagtagtggattgggcatgttcgttgcgaaaaacgaagaaatggttccggtggcaaaaactcgtgttttgtatgcaccccgacacccgtattcggaatgggtgacgtgcggcaacgaaattgcgcgaaaccacccaaacatgagttttggacctaaagtagtggattgggcatgttcgttgcgaaaaatgaagaaatggttccggtggcgaaaactgatgtgcaccccgacacccgttctcggaatcggtgacgtgcggcaacgaaattgcgcgaaaccaccccaaacatgagttttggacctagaatagttgattggacatg

SEQ ID NO: 268 - DNA, 1058 bp, Zea mays
  source: /note="Zea mays BAC clone full insert sequence contig bacb.pk243.l15.fis26"
atccaccgtgtcgtgtgctcctgccatggttagcgcaaacaccaaaacaccaaaaggagaaaaaccgacgacaacagggaaatggtggtgacaactcgctcaatggaatgctgttatcaagttcttatccgttcttaccaagccacagtggtgaactgcaaccaacaggtggaaccggtgaaagattggatgagcgattgcctggagaaacagaaaccttctcgtcgtagaaatatgtggagttttgggtaggctgcactcaactcaaggattagcacaatcaaaaaataatgcaaagttgaattatagtgcaaaacacgaaactatattactggccacaagtgcaaaggacggatggaactagcagaatggcagtaccgtaaatattgtactagcgaggccaaaaaggcactagtatgaatcacaggtgattttgtttttcttttttgtatgatttttttaatatttttctcagcacaaggagcaacaaaataggagctacacgaagtttcacctaaaaaagagttcagatgtggtctatagaaaattaggaagttctccgaaaagcgtgcgagatctttgacgatttttttctttattttcctgaattttttgacaattttatcgaaaccaaacaggccgtaggcgagtttggccggcctcagaatggtgtcaacaagcttctgtaaaaatttcagattttttgaacaaccgagtgaaaagttatgcccggtttaaggaaggtatgtaaaaatcaggaagttgtatcctttctccttcgttttttttgtttctgttttttttacgtaaccgaaggagaaaaacaaggaagcggcgttgactcggtttgtttttttctgtttttttacgtaaccgaaggagaaaaataaggaagcggcgttgactcggtttgtggcgtgatcaaacggaatatggtggcggcgcgctagggtttgaatggtggaataacacaatgcaaccagcaacaaatgacgtgaaagcacacaaattcaacaatgcagattattgaaagaaagtgcgagggctcaaaaggtgct

SEQ ID NO: 269 - DNA, 756 bp, Zea mays
  source: /note="Zea mays BAC clone full insert sequence contig bacb.pk243.l15.fis27"
caaaaaatcatgaaatttgacggaggagcaatatatgctcatatagcatcctaaaaaatgtttgagccataaaatctaaagattgccaacatttctttcaattcactttcacttgttacctgagttacatgtgatatcaccttaactatccaaattttaacataatcaatacttcactttatcattttcacatagggacttcatattatctttaatagaatgtttattggtcctggtaacttatttacaatttttggtagacactagattattttatgattttaattacattttgatgattttttgtagaaagaaattaataatacacaaattgccttagaaattcataaaatttgacggagggttaacatttgtctacataaaattctaaaaaatgtttgtgccataaagtccataagatgccagtgattcttttcattttcttacacttgttgtgtgagttacacgtgaaatcagctgaagtatccaagtttcaacataacctttacttcactttctcattttcatgtagggacttgaggttatcttcttatggaatgtttattagtcttgataacttatttgcaatttttggtcgatactataatattttatggatttaaatgcattttgatgattttctgcaaaaagaaattaataatatacaaatagtctcagaaattcacaaaatttggcgtatgagtaacatatgtccatatagcatcctcaaaaatgtttgaaccataaaaaccacaa

SEQ ID NO: 270 - DNA, 923 bp, Zea mays
  source: /note="Zea mays BAC clone full insert sequence contig bacb.pk243.l15.fis28"
tcgttgccgcacgtcaccaattccaaaaacgggtgtctcggtgcatacaagcacgagtttttgccaccagaaccatttctttgttttgcgcaacgaacatgctgaatccactactttaggtccaaagcttatgtttgggttggtttcgcgcaatttcgttgctgcacgtcacccattccgaaaacgggtgtcgggtgcatacaaagatcgagttttcgccaccggaaccatttcttcgtttttcgcaacgaacatgcccaatccactactttaggtctaaaactcatgtttgagctggtttcgcgctatttcgatgccgcatgttacccattccgaaaaccggtgtcggggtgcatacaagcacgagtttttgccaccggaaccatttctttgttttttgcaaagaacatgcccaatccactactttaggtccaaaactcaagtttggggtggtttcgcgcaatttcgatgccgcacgtcacccatttcgaaaacgggtgttggggtgcatacaaagcacgagtttttgccaccggaaccatttctttgtttttttcaaagaacatgcccaatccactactttaggtccaaaactcatgtttggggtggttttgcgcaattttgttgccgcacgtcacccattccgaaaacgggagtcgggggtgcatacaaagcatgagttttcgccaccggaaccatttcttcgtttttcgcaacgaacatgcccaatccactactttaggtccaaaactcatatttggggtggtttcacgcaatttcgttgcagcacgtcacccattccgaaaacgggtgtcgggtgcatacaaagcatgagttttcgccaccggaaccatttcttcgtttttcgcaacaaacatgcccaatccactactttaggtccaaaactcatgtttggggtggtt

SEQ ID NO: 271 - DNA, 730 bp, Zea mays
  source: /note="Zea mays BAC clone full insert sequence contig bacb.pk243.l15.fis29"
gccctcattctttagtacaatgacgaagttaagatctctggcatgggcccgagtgattggcccagctaatgaaggaggtggcgctcgatgttgaggtgctgctggtgtagtcgtactcatagtgatgtcctcatcatacaaagcacgagttttcgccacaggaactatttcttcgtttttcgcaacgaacatgcccaatccactactttaggtcccaaactcatgtttggggtggtttcgtgcaatttggttgccgcacgtcaccaattccaaaaacgggtgtcagggtgcatacaagcacgagtttttgccaccggaaccttttcttcgttttgcgcaacgaacatgccgaatccactaatttaggtccaaaactcatgtttgtggtggtttcgtgcaatttcgttgccgcacgtcacccattccaaaaacgggtgtcagggtgcatacaagcacgagttttcgccaccggaaccattttttcgcttttcgcaacgaacatgcccaatccactactttaggtccaaaactcatgtttcgggtggtttcgcgcaatttcgttgccgcacgtcacccattacaaaaacgggtgtcgggcggggtgcatacaaagcacgagtttttgccaccggaaccaattcttcgtttttcgcaacgaacatgtccaatccactacattaggtccaaaactcatgtttggggtggtttcgcgctatatctttgccgcacg

SEQ ID NO: 272 - DNA, 965 bp, Zea mays
  source: /note="Zea mays BAC clone full insert sequence contig bacb.pk243.l15.fis30"
caatccactactttaggtccaaaactcatgtttggtgtggtttcgcactatttcgttgccgcacgtcacccattccgaaaacgggtgtcggggtgcatacaaagcacgagtttttgccaccaaaaccatttcttcgtttttcgcaacgaacatgcccaatccactactttaggtccaaaacttatgtttggggtggtttcgcgcaatttcgttgccgcacgtcacccattccgaaaactggtgtcagggtgcatacaaagcacgagttttcgccactggaaccatttcttcgtttttctcaacgaacatgcccaatccactactttaggtccaaaactcatgtttggggtggtttcgcgcaatttcgttgccgcacgttacccattccgaaaacgggtgtcgggtgcatacaaaacacgacttttcgccaccggaaccatttcttcttttttcgcagcgaaaaagtccaatccacttctttaggtcccaaaactcatgtttggggtggtttcgcgctatatcgttgccgcacgtcacccattccgaaaacgggtgtcggggtgcatacaaagcatgagtttttgccaccggaaccatttcttcgtttttcgcaacgaacatgcccattccagtactttaggtccaaaactcatgtttggggtggtttcgcgcaacttcgttgccggacgtcacgcgttccaaaaacgggtgttggggtgcatacaaagcacgagtttttgccaccggaaccatttcttcgtttttctcaacgaacatacccaatccactactttaggtacaaaactcatgtttgggttggtttcgcgcaatttcgttgccgcacgttacccattccaaaaacgattgttagggtgcatacaagcacgagtttttgccaccggaaccatttcatagtttttcacaacgaacattcccattccactactttaggtccaaaactcatg

SEQ ID NO: 273 - DNA, 1441 bp, Zea mays
  source: /note="Zea mays BAC clone full insert sequence contig bacb.pk243.l15.fis31"
atctttgggcaaaagtgaactgtaggtaaataaaacaaggaagattgagatctctcaccgagcaacctgaaatctgataccacttgataaacccaatgggtagaagggtgtccgatctttcgatgagagatgatggaggtggaaaacttgttggagaacgacgttggctgcccgactaccacaaccaagatggtgtggcgccttgagcgacaggtacaccgtctcctgataactacgatttggggtggaggtcgacgttgtgctatccgactacaacaaccacaagggtgctgcgccttagcgatagttacaccggctcctgttgttgctgctcttgccgtgccaagaacaaccttgaacctgcaagcaatcgagaacaagcaagaacaagataaaaagcagacgcatttcttcgttgtcgcacgttacccattccgaaaacgggtggtttcgcgcaatttcgttgtcgcacgttacccattccgaaaacgggtgtcggggtgcatacaagcacgagtttttgccaccggaaccatttcttcgttttttgcaacgaacatgcccaatccagtactttaggtccaaaagtcatgtttggggtggttttgcgcaatttcgttgccgcacgtcacccattccgaaaactggtgtcggggtgcatacaaagcttgagtttttgccaccggaaccatttcttcgtttttcgcaatgaacatgcccaatccactactttaggtccaaaactcatgtttggggtggtttcgcgtaatttcgttgccgcatgtcacccattccgaaaacgggtgtccgggtgcatacaatgcacgagttttttccaccggaaccatttcttcgtttttcgcaacgaacatgcccaatcaactattctagatccaaaactcatgtttgggttggtttcgcgcaatttcgttgccgcacgtcacccattccgaaaacgggtgtcgggtgcatacaaagcatgagttttcgccaccggaaccatttcttcgtttttcgcagcgaacaagcctaatccactactttaggtccaaaactcatgtttggggtggtttcgcgcaatttcgatgccgcacgtcacccattccgaaaacgggtgtcgggtgcatacaaatcatgagttttcgccaccggaaccatttcttcgtttttcgcaacaaacatgcccaatccactactttaggtccaaaactcatgtttggggtggtttcgcgcaatttcgttgccgcacgtcacccattccgaaaacggtagtgggggtgcatacaaagcatgagttttcgccaccggaaccatttcttcgtttttcacaacgaacatgcccaatccactactttgggtccaaaactcatatttggtgtgttttcgcacaatttcgttgtcgtacgtcacccattcccaaaacgggtgtcgaggtgcatac

SEQ ID NO: 274 - DNA, 1179 bp, Zea mays
  source: /note="Zea mays BAC clone full insert sequence contig bacb.pk243.l15.fis32"
gcctctgttcgtctaaccatggcaggattggaggttgatgatgcttcccgtaatatgccacactctcctcgcaccaagggtatcatacaacactttgtaaggatggtgaagacgcatacggaaggtcttgataatgacatgcaggtgacgaatgaaaagatggggcaattggaggccacacagatcgacacaaacaccaaacttgcaaatgtggaaatgacagttgctcatattgacaagagccttgtcgcactcttgaggcgatttgatgagatgcatgctaataccaatggtgggcgtgatgagggcgccgaaggtaactgggatgactatgttgccgatactgaacaagatgaccaagaagcacctaatcactggcgactacgtactaaccgtagaggtatgggtggttttcgccgacgtgaggtacatggtaatgatgatgcttttagtaaggttaaatttaaaatacctccttttgatggtaaatatgaccctgatgcttacattacttgggagattgtggttgatcaaaagtttgcatgccatgaatttcctgagaatgcgcgggttagagctgctactagtgagtttactgaatttgcttctgtttggtggatagaacatggtaagaagaatcctaataacatgccacaaacttgggatgcgttgaaacgggtcatgcgggctagatttgtcccttcttattatgcacgtgatatgctaaacaagttgcaacaattgagacagggtactaaaagtgtagaagaatattatcaggaattacaaatgggtatgctgcgttgtaacatagaggagggtgaggaatctgctatggctagatttttgggcgggttaaatagggaattcaggacatcattgcttataaagattatgctaatgtaacccgattgtttcatcttgcttgcaaagctgaaagggaagtgcagggacgacgtgctagtgcaaggtctaatgtttctgcaggaaaatctacaccatggcaacagcgcacgactacgtccatgaccggccgtacaccagcaccaactccctcatcaagtcgaccagcaccaccgccttcctccggcgacaaaccacgtgcatcttccacaaattcagcaaccaaatctgcccagaaaccagcaggtagtgccttttcagtagcctccatgggta

SEQ ID NO: 275 - DNA, 1029 bp, Zea mays
  source: /note="Zea mays BAC clone full insert sequence contig bacb.pk243.l15.fis33"
cgccatgttccatcttttttaggcactaaaataaccggaacagcacacagactaagagactcacgcacataacctttgtcgagtagttcttgaacttgtcgctgaatttcttttgtttcctccggatttgtcctatatggagcacgatttggcaaagatgcaccaggaataagatcaatttggtgctcaatccctcgtataggtggcagcccctctggtatctcacttggaaatacatcagaatactcctgcaaaatgttagtaacaacaggaggcaaagaatgctgcatatcttgaattgaaatcaaagcatccttgcataccaaggcgtaggcaacagaagtggaagcaaataattcattaacatcagtttttgtcgcaagcaagcaatgtcctttcaattttatcccatctttgttattaccaacagctttaatattcttgttgttctcagttttagctttggtagctttagcaacatcatcacgcacaatagcctcaggggacatgggaatcaaaataattttcttatcatggtgtatgagagttattgatttaatctaccatgatgcatacaatctgaatcaaattgccatggtctacctagcagaatattacaagcatccataggcacaacatcacagtcaacaacatcacgatatgaaccaatagcaaaattaattcgtaccagcttggttaccttgaccttaccactattgttaagccattgaatgtgatatggatgcgggtgcggtttggtcgtaagtgcaagcttctccaccatgtcgctgctagccaagttgttgcagctacctccatcaatgatcaaacgacatgaacgctctttaatgacacactttgtttgaaacaacgtatgtcgctgattctgctctgccttctccatttgtgcactaagcacacgctgtacaatgaggctctcataatgctctgcatcatctgcaccaaccgttcctcggggtggttctttagtgcctgcatcatcagccgcaagcaaacgaggtgaagctc

SEQ ID NO: 276 - DNA, 1058 bp, Zea mays
  source: /note="Zea mays BAC clone full insert sequence contig bacb.pk243.l15.fis34"
ttccttgatgagatttagtttggttgcatttgagaaaggaaaggtttcctgaattgcaaaaatctaaattgttgcctcgagccgatggaccgtttaaagtgctagagaaaattaacgacaatgcatataggctagatctgcttgcagactttggggttagccccacatttaacattgcagatttaaagccctacttgggagaggaagttgagcttgagtcgaggacgactcaaatgcaagaaggggagaatgttgaagacatccacactactgatacatctatgccaatacaagtaccaatttctggtcccattacttctggtcccattactcgcgctcgtgctcgtcaactcaaccatcaggtgcttacactcttgaatgcatgtccatcatatttagaccatggagacccgtgcactcttgttttgcttaggaaccagggagaagaccgaaagggaaaaggatttgaacatgctggattcggactgcagaagaacaccaaattgtgacggtcaccacggtcacatgcgggctcggattggaatgttcaagcacaacatggaaagcctatcaagtctactttcatatggatccggaattatagtcatatctgtactgaggccgccgtaatcattgtttccttacagagacatttcctgccttttctgcccatggtgctgtgtgaccctattttggcccaatgggtcgtgtatcaagttgggtccattagggacgcatcctagggttgcagcacgaccccaatacccttgtggtcgtcctcccatgtttataaaccccctagccgccaccaagaacagcgggtttttttagatcaagtttagctctcgctacttgcttgtaagcgcgcgtgctggttcagccgcccgtcttcttgtcttcggaaccccaccatattggagtttgattttgaaacctgcatttagatctggtaattcagtacttgttctacttgttcttgctagttcttcgattgcttgcaggacgagtgccctagtggccagggtgtcacgctccacaagatcgtgacagccatagga

SEQ ID NO: 277 - DNA, 1335 bp, Zea mays
  VARIATION (1250)..(1250): /replace="c" or "g" or "t"
  misc_feature (1250): /note="Nucleotide given in the sequence has no preference with respect to those in the annotation for said position"
  source: /note="Zea mays BAC clone full insert sequence contig bacb.pk243.l15.fis35"
tgactcggttttgtggcgtgatcaaacaggagatggtggcggcgctagggtttgaatggtggaagaacacaatgcaaccaacaacaaatgacgcgaaagcacacaaattcaacaatgcagattattgaaagaacgtgcgaggctcaaaatggtgctgggataaggtctaacctgaatttttatgtggttttgtggactgtaggaaaaaaacactctataaactcaccgatcaacctggaaatctgataccaattgatgtagctgaggtgcccgatctttcggtgagaggagataattccgatttggcggaagatgacccttgcgatccgactacgacgagcaagcccgaggcgccaatgcaatcgctgaaccaatgatgaggacatcctccactattacccgttggcaaagacgtaattggcccagatggcccaattgtagtcggacggcgaccgtgtgagcctcagaattatcccacctcgcttaacttgggaggaggaagccactttaaaagggagagtcacccttccccattggactagtcttttggggcgattgggcctttccctgagttgggtgtgcctaatgaactgttgggctccgggcaaccctaatttgttgggcctcggccaaccccacctggactgggtgtatcatctggtatcagagctagggcccattttaagaaggtaggaatgatgaggacatcctccactattacccgttggcaaagacgtaattggcccagatggcccaattgtagtcggacggcgaccgtgtgagcctcagaattatcccacctcgcttaacttgggaggaggaagccactttaaaagggagagtcacccttccccattggactagtcttttggggcgattgggcctttccctgagttgggtgtgcctaatgaactgttgggctccgggcaaccctaatttgttgggcctcggccaaccccacctggactgggtgtatcaaccaactccctgtggttaccgaccttgctgatgcgagatcggcctgatcacgaagatcgtttcctgtgcgcaatcgaagaacgaacaagaaaaagatgcgagcaatctaatctattactcgagggtggagttctgaatacaagaagacaacgcagatttgcgcgtgttcgagagtagctaaggctaacgtaaaacaaaactcgaagacaaaggaggcgcagctcctgtttaaatagagagggggcgcagcccctaggggcggccaaccctaagtcgtccactatgggccgcagttgggttggtcgtctattcttctgggccctcattctttagtacaatgacgaagttaagatctct

SEQ ID NO: 278 - DNA, 923 bp, Zea mays
  source: /note="Zea mays BAC clone full insert sequence contig bacb.pk243.l15.fis36"
aatcaatgacagaaaccaaacgaggcgtctagaaactgccaagagagtttcgttctccattagaactcctttctattcctctatttaagcaagtagcagccaccaaagaacttaggtttttgtttgatgtaagtttagcctttgctacttccttgtaaacgcgtgtgtcggctagaccacccggatacttgaaacagaaccccaactctatcagatccgtgagcgtctgtgttttatcttgttcttgcttgttctcgattgcttgcaggttaaaggctattcttggcacggcaagagcagcaacaacaggagccggtgtaactatcgctaaggcgcagcacccttgtggttgttgtagtcggatagcacaacgtcgacctccaccccaaatcatagttatcaggagacggtgtacctatcggtcaaggcgccacaccatcttggttgtggtagtcgggcagccaacgtcgttctccaacaagttttccacctccatcatctctcatcgaaagatcgggcacccttctaccccgttgggtttatcattcagtgtcgcctgggttgacatgtacctacacctgagctgcatggttagtggcaagtactgtgatgagaacataaacccgcaagatatgggccatgtttatgggctcccgctaccaaagactttgaagggaccaaataaggttgatttggggacccaaataatgatatttccaaaaaatttctaacccagcaaggccattcctccaaattttaaaaaactaacttggggttgagggagaacaccctaaaaattccaaggaaaaactcctttttacacaaaaggggggaggaaattttaagaaaaccttccccgccttcaataaaaaaacaacacccggggaggccccctctttaaaattttaaaaaagggggagaag

SEQ ID NO: 279 - DNA, 1558 bp, Zea mays
  VARIATION (1534)..(1534): /replace="c" or "g" or "t"
  misc_feature (1534): /note="Nucleotide given in the sequence has no preference with respect to those in the annotation for said position"
  source: /note="Zea mays BAC clone full insert sequence contig bacb.pk243.l15.fis37"
atctggaaagggcacatctttgtagaagaatgcgtggcatgattgtaagcaaattcaatatgaggcaagcaatcctcccaacgtctcaaattcttgtctaaaacagccctaagcatggtagataaagtgctatttactacctcagtttgtccatcagtctgagggtgacaagtagtgctaaacaacaatttagttcccaatttattccaaagagatctccaaaaatggcttagaaacttagcatcgcgatcagagactattgtttttggaataccatgtaaacgaataatttctctaaagaacaattcagcaacaatgctagcatcatcagttttatgacaaggtataaagtgagccattttagagaatctatcaacaaccacaaaaatactatccctccccttcttagttctaggcaagcccaaaataaagtccatagagatatcaagccaaggagaagaagggacaggcaaaggcatatacaaaccatggttgttcaaccgtgacttagctttctgacaagtagtgcagcgtgcaacaaggcgctccacatcagcgcgcatccgaggccaaaagaaatgggcagccaacacctcatgcgttttgtagacgccaaaatgccccatgagaccgcctccatgcgcttcctgtaacaacaaaagacgaaccgagctagctggaacacaaagcttgttagcgcgaaacaggaacccatcctgtatgtgaaatttgccccatggtatcccattaatacaatggccgaaagcatctttaaaatcagcatcgtcaacatattgatccttcatagtgtccaaaccaaagattttaaaatctaattgtgacagcatggtatagcgacgagacaaagcatcagcaataacattgtccttcccgttcttgtgtttaataatgtaaggaaaggactcaatgaattcgacccatttagcatgacgacggttcagatttgtttgggtacgaatatgttttaaagcctcatgatcagaatgaattatgaactcacgatgccaaagatagtgctgccaagtatgcaaagtgcgcactaaagcgtaaagctccttatcataagtagaatatttcagactagcaccgcttaatttttcactaaaataagcaactggttttccttcttgtaacaaaacagcacctagcccaataccgctagcatcgcattcaagctcaaaaactttattaaaatcaggcaattgcaagaggggagcttgggttaacttatctttcaaagtgctgaacgctacctcctgcgaatcactccaagcaaacggcacatctttctttgtaagctcatgtagaggcgctgcaatggagctaaaatcacgaacaaatctgcggtagaaaccggcaagtccaagaaagctccgaatttgtgtgaccgtcgtcggtgtaggccactcccgaatggcagcaatcttgctgctatccacctcaatgccctgcggagtaaccacataaccaagaaacgagacacgttgcgtgcaaaatgtgcacttttccatgattaccaagcaagcgagcagcacgc

SEQ ID NO: 280 - DNA, 1081 bp, Zea mays
  source: /note="Zea mays BAC clone full insert sequence contig bacb.pk243.l15.fis38"
taagcaaaacaagagtgcacgggtccccatggtctaaataagatggacatgatgatgaggacatcactatgagtacgactacaccagcagcacctccacatcaagcgccacttccttcattagctgggccaatcactcgggcccgtgccagagatcttaacttcgtcatgctactgaaaaatgagggcccagaagaatagacgaccagcccaactgcggcccatagtggacgacctagggttggccgcccctaggggctgcgccccctctatttatccaggagctgcgcctcctttattttcgagttttgttttacgttagccttagctactctcgaacacgcgcaaatctgcactgtcttcgtgtattcagaactccaccctcgagtaatagattagattgctcgcatctttttcttgttcgttcttcgattgcgcacaagaaacgatcttcgtgatcaggccgatctcgcatcagcaaggtcggtaaccacagggagttggttcagcgattgcattggcgcctcgggcttgctcgtcgtagtcggatcgcaagggtcatcttccgccaaatcggaattatctctactcgccgaaagatcgggcacctcagctacatcaattggtatcagatttccaggttgatcggtgagtttatcgagcgtttttttcctacagtccacaaaaccgcataaaaattcaggttagatcttatcccagcacccttttgagcctcgcactttctttcaataatctgcattgttgaatttgtgtgctttcacgtcatttcttgctggttgcattgtgttcttccaccattcaaaccctagcgccgccaccatctcccgtttgatcacgccacaaaccgagtcaacgttgtttccttgtttttctccttcggttacgtcaaaaaaaaacagaaaaaacaaaccgagtcaacggccgtttccttgattttctccttcggttacgaaaaaaacagaaaaaaaacaaaccgagtcaacgaccgcttccttgttttttctccttcggttacctaaaaaaaaccgattccaaaaaaaagaaacgaaggagaaagatac

SEQ ID NO: 281 - DNA, 1607 bp, Zea mays
  source: /note="Zea mays BAC clone full insert sequence contig bacb.pk243.l15.fis39"
aaatattcgttaccgacgctatccgtgtctgattagctccgcattcgatccacgactatccgtttttgtattcgagaacatccgtatttgtattcgtatttgaagctatccgcattcgattccgactaaaaatatgaaaacaaatatggtttcattgatatccgtccgtatccgatccgattacacccctaagcatgagttttcgccacagaaaccatttctttgtttttcgcaacaaacatgcccaatccactactttaggtccaaaactcatgtttggggtggtttcgcgcaatttcgttgccgcacgtcacccattccgaaaacggtagtcggggtgcatacaaagcatgagtttttgccaccggaaccatttcttcgtttttcacaacgaacatgcccaatccactactttgggtccaaaactcatgtttagtgtgttttcgcgcaatttcgttgtcgtacgtcacccattcccaaaacgggtgtcggggtgcatataaagcacgacttttgccaccggaaccaattcttcgtttttcgcaacgaacatgcccaatccacttctttaggtccaaaactcatgtttggggtggttccgcgctatttcgttgccgcacgtcacccattccgaaaacgggggtcggagtgcatacaaagcacgagtttttgccaccggaaccatttcttcgtttttgcaacgaacatgcccaatccactactttaggtctaaaactcatgtttgggttggtttcgcgcaatttcgttgccgcacggaacccattccgaaaacgggtgtcagggtggatacaaagcacgagttttcgccaccggaaccatttcttcgtttttcgcaacaaacatgcccaatccactactttaggtccaaaactcatgtttggggtggtttcgcgcaatttcgttgccgcacgtcacccattccgaaaacgggtgtcggatgcatacaaagcatgagttttcgccaccggaaccatttcttcgtttttcgcaacgaacatgcccaatccactactttaggtccaaaactcatgtttggtgtggtttcgcgctatttcgttgccgcacgtcacccattccgaaaacgggtgtcggggtgcatacaaagcacgagtttttgccaccgaaaccatttcttcgtttttcgcaacgaacatgcccaatccactactttaggtccaaaacttatgtttggggtggtttcgcgcaatttcgttgccgcacgtcacccattccgaaagctggtgtcggggtgtatacaaagcacgagttttcgccattggaaccatttcttcgtttttctcaacgaacatgcccaatccactactttaggtccaaaactcatgttgggggtggtttcgcgcaatttcgttgccgcacgttacccattcggaaaacgggtgtcgggtgcatacaaagcatgacttttcgccaccggaaccatttcttcgtttttcgcagcgaacaagtccaatccactactttaggtccaaaactcatgtttggggtggtttcgcgcaatttcgttgccgcacgtcacccactctgaaaacgggtgtcggggtgctgagcacgagttttcggcaccg

SEQ ID NO: 282 - DNA, 968 bp, Zea mays
  source: /note="Zea mays BAC clone full insert sequence contig bacb.pk243.l15.fis40"
cacaactacaagccgggttagcgttagaagtaaaaacaagtccgcgagagagggtgcaaaacaaatctcaagcaaataagaagtgagacacacggatttgttttaccgaggttcggttctcgcaaacctactccccgttgaggaggccacaaaggccgggtctttttcaaccctttccctctctcaaacggtcactcaaaccgagtgagcttctcttctcaaatcacttgggaatcaaacttcccgcaaggaccaccacacaattggtgtctcttgcctcaattacaagtgagtgtttgatcacaagaaagaatgcgaaagaaaagaagcgatccaagcgcaagagctcaaatgaacactacaaatcactctctctagtcactaaggatttgtgtgaagttgggagaggatttgatctcttttggtgtgctttgcaatgaatgctagctcttgtatagtggttggaagctggaaaacttggatgctttgaatgtgggggtggttggggtatttatagccccaaccaccaaacttgaccgttggtggaggttgtctgttgtatggtgcaccggacagtccggtgcacatcggacatgtccggtgcgccacccacgtcaccaataccgttggattccgaccgttggagcttctgtcttctgggcccgcctggatgtccggtgcacaccggacatgtactgttcaatgtccggtgcgccagtatgggcgtgcctgacttctgcgcgcttctggcgcgcattgaatgcgcctgcaggtgaccgttggcgcgaagtagtcgttgctctgctggttcacggaacagtccggtgtacaccggacatgtccgggtgattatagcggagcagccgctgcgttttcccgaggatgggagttccggaagctgctcttccttggagcaccgaaactgtccggtgtacaccggaaagtctggtgaattgtagcggagtgcc

SEQ ID NO: 283 - DNA, 888 bp, Zea mays
  source: /note="Zea mays BAC clone full insert sequence contig bacb.pk243.l15.fis41"
gactaagcttttattttctactacatgtcatcctcaaactgatggtcaaactgaagttgtgaatagaactttgtctactatgttaagggcagttctaaagaagaatattaagatgtgggaggactgtttgcctcatattgaatttgcttataatcgatcattgcattctactacaaagatgtgcccatttcagattgtatatggtttgttacctcgtgctcctattgatttaatgcctttgccatcttctgaaaaactaaattttgatgctactaggcgtgctgaattgatgttaaaactgcacgaaactactaaagaaaacatagagcgtatgaatgctagatataagtttgctagtgataaaggtagaaaggaaataaattttgaacctggagatttagtttggttgcatttgagaaaggaaaggtttcctgaattacgaaaatctaaattgttgcctcgagccgatggaccgtttaaagtgctagagaaaattaacgacaatgcatataggctagatctgcctgcagactttggggttagccccacatttaacattgcagatttaaagccctacttgggagaggaagttgagcttgagtcgaggacgactcaaatgcaagaaggggagaatgatgaagacatccacactactgatgcatctataccaatacaagtaccaatttctggtcccattactcgcgctcgtgctcgtcaactcaaccatcaggtgattacactcttgagttcatgtccatcatatttagaccatggagacccgtgcactcttgttttgcttaggaatcagggagaaaaccgaaagggaaaggatttgaacatgctggattcggactgcagaagaacaccaaacttgtgacggtcaccacg

SEQ ID NO: 284 - DNA, 858 bp, Zea mays
  source: /note="Zea mays BAC clone full insert sequence contig bacb.pk243.l15.fis42"
gataccaaatgaggcgtccagaaactgtcgagagaacttcttgactccaccagtccgagggaattcgtaactgcagcaagcaccatattaaatggagcatatctttcatctcctaaggttgtttagtgcaaataagtacttgttggaaagctctcttcgtctactttctggcggctgaagaatcaatgggagaaaccaaacggcacgtccagaaactgtcgagagagcttcgttctccaccagaacttctttctattcctctatttaagcaactagcagccaccaaagaacttgggttttttgtttgatgtaagtttagcctttgttacttccttgtaaaagcgtgtgtcggctagaccacccggatacttgaaacagaaccccaactctatcagatccgtgagcgtctgctttttatcttgttcttgcttgttctcgattgcttgcaggttcaaggttgttcttggcacggcaagagcagcaacaacaggagccggtgtaactatcgctaaggcgcagcacccttgtggttgttgtagtcggatagcacaacgtcgacctccaccccaaatcgtagttatcaggagacggtgtacctgtcgctcaaggcgccacaccatcttggttgtggtagtcgggcagccaacgtcgttctccaacaagttttccacctccatcatctctcatcgaaagatcggacacccttctacccattgggtttatcaagtggtatcagatttcaggttgctcggtgagagatctcaatcttccttgttttatttacctacagtccacttttgcccaaagatatatttagagcagaaattcacctaaaaacagtttgagcctttgctttac

SEQ ID NO: 285 - DNA, 1380 bp, Zea mays
  source: /note="Zea mays BAC clone full insert sequence contig bacb.pk243.l15.fis43"
catcctggcacgccttgatgcgttgaccacaaagatggagcaggactacggcggtgacactgagcaagacgatggagatcgccatggtcgtgcatgccatgtggttcgtcatccccctaatgacttattttctaagattaaatttaaaattccaccttttcatggcaaatatgatcctgctgcatatcttgattgggagttagaggttgaacaaaaattttcatgccatgatattgctgcacattctcagattaaagctgctattagtgaatttactgattttgctttaatttggtggcgtgagtataaaataaaacatcccactgccattccaaccacttgggatcagttgaaagctgcgatgcgacatcgatttgtgccttcatattatgctcgtgatttgcttaataaaatgaagcgttttcagcaaggttctcaatctgttgaggagtatttccaggagttacaaaaaggtatgattcgttgtgggatattggaggacaacgacgctgctacggcacattttcgtggtggtttaaaccgcgaaatccaggatatacttgattataaggaatattatgatatgactactttatttgaatatgcttgcaaagctgaacgtgaagtgcagggacgccgctcgaagccatattctaacccttttgcaggacgaagctcgacatccacctcagcaccagttccccctgcgccatccacgtccaccactactccacgcgagaagacgaccaaaccagccagcactgccccacccacaggtcgtacacgggatattcagtgtcatcgctgtagaggatttggccatgtgattcaggactgcccaaacaagcgcactttgctcattcgtgacgatggtgagtactcttccgctagtgattctgaagaaattgaacatgcactatgataaacccaatgggtagaagggtgcccgatctttcgatgagagatgatggaggtggaaaacttgttggagaacgacgttggctgcccggctaccacaaccaagatggtgtggcgccttgagcgacaggtacaccgtctcctgataactacgatttggggtggaggtcgacgttgtgctatccgactacaacaaccacaagggtgctgcgccttagcgatagttacaccggctcctgttgttgctgctgttgccgtgccaagaacaaccttgaacctgcaagcaatcgagaacaagcaagaacaagataaaaagcagacgctcacggatctgatagagttggggttctgtttcaagtatccgggtggtctagccgacacacgcgtttacaaggaagtagcaaaggctaaacttacatcaaacaaaaaacccaagtgctttggtggctgctagttgcttaa

SEQ ID NO: 286 - DNA, 1277 bp, Zea mays
  VARIATION (1177)..(1177): /replace="c" or "g" or "t"
  misc_feature (1177): /note="Nucleotide given in the sequence has no preference with respect to those in the annotation for said position"
  source: /note="Zea mays BAC clone full insert sequence contig bacb.pk243.l15.fis44"
ttgtaaagatgggaaaggatggaacaaatatatcgttagtgatgggtttgtgtttagagctaacaagctatgcattccagctagctccgttcgtttgttgttgttacaggaagcacatggaggtggcttaatgggacattttggagcaaagaaaacggaggacatacttgctggtcatttcttttggcccaagatgagaagagatgtggtgagattggttgctcgttgcacgacatgtcaaaaggcgaagtcacggttaaatccacacggtttgtatttgcctctacccgttcctagtgctccttgggaagatatttctatggattttgtgctgggattgcctaggactaggaaaggacgtgatagtgtgtttgtggttgttgatagattttctaagatggcacatttcataccatgtcataaaactgacgatgctactcatattgctgatttgttctttcgtgaaattgttcgcttgcatggtgtgcccaacacaatcgtttctgatcgtgatgctaaatttcttagtcatttttggaggactttgtgggcaaaattggggactaagcttttattttctactacatgtcatcctcaaactgatggtcaaactgaagttgtgaatagaactttgtctactatgttaagggcggttctaaagaagaatattaagatgtgggaggaatgtttgcctcatgttgaatttgcttataatcgatcattgcattctactacaaagatgtgcccatttcagattgtatatggtttgttgcctcgtgctcctattgatttaatgcctttgccatcttctgaaaaactaaattttgatgctactaggcgtgctgaattgatgttaaaactgcatgaaactactaaagaaaacatagagcgtatgaatgctagatataagtttgctagtgataaaggtagaaaggaaataaattttgaacctggagatttagtttggttgcatttgagaaaggaaaggtttcctgaattgcgaaaatctaaattgttgcctcgagccgatggaccgtttaaagtgctagagaaaattaacgacaatgcatatatgctagatctgcttgcagactttggggttagccccacatttaacattgcagatttaaagccctacttgggagaggaagttgagcttgagtcgaggacgactcaaatgcaagaaggggagaatgatgaagacatccacactactgatacatctatgccaatacaagtaccaatttctgggtccattacttctggtcccatactcg

SEQ ID NO: 287 - DNA, 1261 bp, Zea mays
  VARIATION (1228)..(1228): /replace="c" or "g" or "t"
  misc_feature (1228): /note="Nucleotide given in the sequence has no preference with respect to those in the annotation for said position"
  VARIATION (1241)..(1241): /replace="c" or "g" or "t"
  misc_feature (1241): /note="Nucleotide given in the sequence has no preference with respect to those in the annotation for said position"
  source: /note="Zea mays BAC clone full insert sequence contig bacb.pk243.l15.fis45"
ttttttttttttttttagggcgggggaagaatcttaaattttctccccaaagaggtgaggagggcttttttttgggggatgggtttcaacaccaaggggccttatggggttttaacaaattccccgtggcaggttgaagtttcctgggacgtttgttttgatgagccaaacgctttccaagtagagcaagttgatcttgatgagatagttatggaagagcccccggcatcgcataaagaaaatttccatggggatgtggtctaagaatcggagaggcctccaaatgcacaggatcaaccatcctctccatggcaagcatctccaccgactcaaaatgaggatgaagctcaagttgatgaagaagaaggtcaagcaagtgaaccacctcaagataacggcaatgatcaagggggagatgcaaatgatcaagacaaggaggatgaagagcaaagaccgccacacccaagagtccaccaagcaattcaacgagatcaccccgtcgacaccatcctcgacgacattcataagggggtaactactagatctcgtgttgcacatttttgtgagcattactctttcgtttcctctattgagccacacaggatagacgaagcactccaagaatcggattaggtggtggcgatgcaagaggagctcaacaacttcactaggaatgaggtatggcatttagttccacgtcctaatcaaaatgttgtaggaaccaaatgggtcttccgcaacaagcaagatgagcatggtgtggtgacaaggaacaagctcgacttgtggccaagggatactcccaagtcgaaggtttggattttggtgaaacctatgcacccgtagctaggcttgagtcaattcgcatattattggcctatgttacttaccatggctttaagctttatcaaatggacgtgaaaagtgccttcctcaatggaccaatcaaggaagaggtctatgttgagcaacctcccggctttgaagatagtgagtaccctaaccatgtttataagctctctaaggcgctttatgggctcaagcaagccccaagagcatggtatgaatgcctaagagatttccttatcgctaatggcttcaaagtcgaaaaggccgatcctactttatttactaaaactcttgaaaatgacttgtttgtatgccaaatttatgttgatgatattatatttgggtctactaacgagtctacatgtgaaagatttagtaagatcatgacacaaaaattcgagatgtctatgat

SEQ ID NO: 288 - DNA, 1105 bp, Zea mays
  source: /note="Zea mays BAC clone full insert sequence contig bacb.pk243.l15.fis46"
ctgcgaacgccccacatgtagatgctgctgcacatgttgaacaaatgattaccatacatgaacaaacgaaacagaacattgctgctactaatgctaaaaatcaggttgctggtagtaaaggaagaaaacatgttacttttgagccaggtgatatggtttggttgcacttgagaaaggatcggtttcctactttgcgccgttctaaattaatgcctcgtgctgctggtccttttaaggtgctaacaaagattaatgataatgcttatatccttgacctgcctgcggaatttggtgtttccactagttttaatgttgcaaatttgaaaccatatatggccgaggatgaggagttgtcgtcgaggacgacttcacttcaagaaggggaggatgatgaggacatcactatgagtacgactacaccagcagcacctccacatcaagcgccacttccttcattagctggccaatcactcgggcccgtgccagagatcttaacttcgtcatgctactgaaaaatgagggcccagaagaatagacgaccagcccaactgcggcccatagtggacgacctagggttggccgcccctaggggttgcgccccctctatttatccaggagctgcgcctcctttattttcgagttttgttttacgttagccttagctactctcgaacacgcgcaaatctgagctgtcttcgtgtattcagaactccaccctcgagtaatagattagattgctcgcatctttttcttgttcgttcttcgattgcgcacaggaaacgatcttcgtgatcaggccgatctcgcatcagcaaggtcggtaaccacagggagttggttcagcgattgcattggcgcctcgggcttgctcgtcgtagtcggatcgcaagggtcatcttccgccaaatcggaattatctcctctcatcgaaagatcgggcacctcagctacatcattgtatccaccccgacacccgttttcggaatgggtgacgtgcggcaatgaaatagcgcgaaaccacaccaaacatgagttttagacctaaagtagtggattgggcatgtttgttgcgaaaaacgaagaattggttccggtggcaaaagtc

SEQ ID NO: 289 - DNA, 1028 bp, Zea mays
  VARIATION (989)..(989): /replace="c" or "g" or "t"
  misc_feature (989): /note="Nucleotide given in the sequence has no preference with respect to those in the annotation for said position"
  source: /note="Zea mays BAC clone full insert sequence contig bacb.pk243.l15.fis47"
gagaaagcaaaaggcgagtgcataaaaaaagccgcactaatcagcaaaacaaaaaaaagacacgtgcaaaaaaaaagagagaaaaaaccagttctgatttttggtagataaaatttgtaagtgcaacaaaacaaaaggcagtttgtgtgccttctttttatagtttcagaaatccgattgatgttctgaccttttggtgatactatttgtgtaacggctcgtgtctctattacggtttggactagaaccagcacaacaccattatagaacgtttattcaacttgttgtgactaacgtggtactagctattccttggaactattgaaattgcagctacctataaatccacaaatttttctacaacaccaccaggttgtgctagctgccaccgttgttgttgttcttgctgtttgctggcacctcctgtattgcgtggtgagaatttgtaagaactttcttaaccagtttgagaatgagagattacaacaatgattcctagtagtttataggatcaaagatatttttattgttttcttgtctttactgaacatggcaggtgatatggagatttctgagccaactgaacattatattcaaggcatcattcgacacttgccttcatatgccggtaaattcgatcctcatgcatacattgattgggagctaaaggtagataaggaatttgataagcatgatctatctcaaaaacaaaagatttatattgcctctaatttgttaactgagcacgcattgatggaatggaaatacatttgtaggcacaacaaatttccacaatcttgggaagacttcaaacttcattttagagatgcattcattcctgcatactattctgatcatttgctttctaaattagacaccttaaagcagggtgctaggactatgaaagattattattatgattttaaaatttgtaccatgtttgctcgtttagatgaatgcatggaagatgtaatgactaggttcatgaaagggactcattctgaaattcagactatagtcatgcatga

SEQ ID NO: 290 - DNA, 1136 bp, Zea mays
  source: /note="Zea mays BAC clone full insert sequence contig bacb.pk243.l15.fis48"
catctgatatctgttttaggtgaaacttcgtgtagctcctatcttgttgcttcttgtgctgagaaaaatatcaaaaaatcatacaaaaaaagaaaaacaaaatcacctgtgatttctactagtgcctttttggcatcactagtacaatatttatggtactgccattctgctagttccatccatcctttgcacctgtggccagcaatatagtttcgtgttttgcactataattcaactttgcattattgtttgatcgtgctaatccttgacttgagtgcagcctacccacaactcctcatatttctacgacgagcaggtttctgtttctccacgcaatcgctcatccaatctttcaccggttccacctgttgattgcagttcaccactgtggcttggtaagaacggataagaacttgataacagcactagtgtgagcgccttgtgagcagtacacccctgtttttgtcgttgggttttctccttttggtgttttggtgtttgcgctaaccatggcaggagcacacgacatggtggatgcccagttgcaggaagtaaggggacaagttgatggacttgctgctgacattaggacgatgcatgaacggcttgattcaacgatcacttcgacgaccgagcgtttcaaccaacttgaccttgctcaaacggcgactcgcaccacactcgacaccatcctggcacgccttgatgcattgaccacaaagatggagcaggaatacggcggtgacactgagcaggacgatggagatcgccgtggttgtgcacgtcgtgtggttcgtcatccccctaatgacttaatttctaagattaaatttaaaattccatcttttaatggtaaatatgatcctgctgcatatcttgattgggaattagaggtagaacagaaattttcatgccatgatattcctgctaatagccaagtgaaggctgccattagtgaatttactgattttgctttaatttggtggcgtgagtataaacaaaaacttcccattaacagtgtcattacttggacccaattaaaaactgccatgcgccacagatttgttccttcctattatgctcgtgatttgcttaacaaaatgcagcgttttcaacaaggttcacagtctgttgag

SEQ ID NO: 291 - DNA, 689 bp, Zea mays
  source: /note="Zea mays BAC clone full insert sequence contig bacb.pk243.l15.fis49"
cgttgcgtgcaaaatgtgcacttttccatgttaccaagcaagcgagcagcacgcaaagcgtcaaaaacagcacgcaaatgttctaaatgctcctctatagacttgctgtaaataaggatatcatcgaaataaacaacaacaaacaaacctatgaaggcccgtagaacttcgttcattaaacgcataaaggtgctggagcattagtcaatccaaatggcataaccaaccattcatataaaccaaatttcgttttaaaagccgttttccattcatcaccgagtttcattctaatctgatggtaaccgctacgcaaatcaaccttagagaaaataacggcaccactaagctcatctagcatatcatcaaggcgtggaataggatatcgataacgaactgtgatgttattaatagcacgacaatctacgcacatacgccatgacccatctttctttggaacgagtaaaacaggaaccgagcaagggctaagagactcacgaatgtaacccttatcaagcagcgtctgcacctggcgctggatctccttcgtctcatctggatttgtacggtacggggcacggttcggaagagaagcgccggggatgagatcgatctgatgctcaatgccacagaggggaggaagacccggtggtaagtccgtaggataaacatcagcatactcctgcaaaagg

SEQ ID NO: 292 - DNA, 832 bp, Zea mays
  source: /note="Zea mays BAC clone full insert sequence contig bacb.pk243.l15.fis50"
gtgatttgcttaacaaaatgcagcgttttcaacaaggttcacagtctgttgaggattattaccaggagttacaaaagggtatgcttcgttgtggtttagttgagtcggatgacgctgctatggcgcgttttcgtggtggtttgaacagggaaattcaggatatacttgattataaggattattttgatataaccacattgtttgaatatgcttgcaaagctgaacgtgaagtgcagggacgacgatcaaagacatatactaactctcttgcaggccggggtccaacacacagctcaactccttccagccctgcaccttctacgcctagcactacatcgcgcacagggacgaccaagccagtggcgccccctgccaaaggcgccgcttcttccacaggacgtacacgggatattcagtgccatcgttgcagagggtttgggcatatgattcgggactgcccaaacaagcgtaccttgcttatacgtgacaatggtgagtactcttcagccagtgattctgaggaaactagtcatgctatgattgccactaaccatgcagaaaatgaggaagtccacgttgatcctatcgacgccgataggtatgagagtcttgttgtgcagcgtgttctcagcacacaggttgcccaggccgaaaaaaatcagcgacacactctattccataccaagggcgtcgtgcacgaacggtcgattcgcatcatcatcgatagtggcagctgcaacaatttggcaagtacagcgttggtagagaaattatccttgcccactcgcacacatccacatccgtatcacattcaatggcttaatgatggtgg

SEQ ID NO: 293 - DNA, 2163 bp, Zea mays
  source: /note="Zea mays BAC clone full insert sequence contig bacb.pk243.l15.fis51"
ggtacctcccttaaaccgggcataacttttcgctcgggtgtccaaaaaatctgaaatttttacaggagctagttgacaccattctgaggccgaccaaacttaccttcggtctgtttgggtttcgacaaaattgtcaaaaaaattcaggaaaataaagaaaaaaatccgtcaaagttcttgcacgctctttagagaacttcctgattttctgtagaccacatcagaactctgttttaggtgaaacttcgtgtagctcctattttgttgcttcttgtgctgagaaaaatatcaaaaaaatcatacaaaaaagaaaaacaaaatcacttgtgattcctactagtggcctcgctagtacaatatttacggtactgccattctgctagttccatccgtcctttgcacttgtggccagcaatatagtttcgtgttctgcactataattcaactttgcattattgtttggtcgtgctaatccttgacttgagtgcagcctacccaaaactccacatatttctacgacgagaaggtttctgtttctccaggcaatcgctcatccaatctttcaccggttccacctgttggttgcaggtcaccactgtggcttggtaagaacggataagaatttgataacagcactagtgtgagcgccttgtgagcagtacacccctgtttttgtcgttgtttttttttcttcttttggtgttttggtgtttgcgctaactatggcaggagcacacgacacggtggatgcccagttgctggaagtaaggggacaagttgatggacttgctgatgacattaggacgatgcatgaacggcttgattcaacggtcacttcgacgaccgagcgtttcaaccagcttgaccttgctcaaacggcgactcgcaccacactcgacaccatcctggcacgccttgatgcgttgaccacaaagatggagcaggactacggcggtgacactgagtgggaagatggagatcgccgtggtcgtgcacgccatgtggttcgtcatccccctaatgacttattttctaagattaaatttaaaattccaccttttaatggcaaatatgatcctgctgcatatcttgattgggagttagaggttgaacaaaaattttcatgccatgatattgctgcacattctcaggttaaagctgctattagtgaatttactgattttgctttaatttggtggcgtgagtttaaaataaaacatcccactaccattccaaccacttgggatcagttgaaagctgcgatgcgacatcgatttgtgccttcgtattatgctcgtgatttgcttaataaaatgcagcgttttcagcaaggttctcaatctgttgaggactatttccaggagttacaaaaaggtatgattcgttgtgggatattagaggacaacgacgctgctatggcacgttttcgtggtggtttaaaccgcgaaatccaagatatacttgattataaggaatattatgatatgactactttatttgaatatgcttgcaaagctgaacgtgaagtacagggacgccgctcgaagccatattctaacccttttgcaggacgaagctcgacatccacctcagcaccagttccccctgcgccatccacgtccaccactactccacgcgagaagacgaccaaaccagccagcactgccccacccacaggtcgtacacgggatattcagtgccatcgttgcagagggtttgggcacatgattcgggactgcccaaacaagcgtaccttgcttatacgtgacaatggtgagtactcttcagccagtgattctgaggaaactagtcatgctatgattgccactaaccatgcagaaaatgaggaagtccacattgatcccatcgacgccgataggtatgagagtcttgttgtgcagcgtgttctcagcacacaggttgcccaggccgaaaaaaatcagcgacacactctattccataccaagggcgttgtgcacgaacggtcgattcgcatcatcatcgatagtggcagctgcaacaatttggcaagtacagcgttggtagagaaattatccttgcccactcgctcacacccacatccgtatcacatccaatggctcaatgatggtggtaaaataaaggtaacacggttcggtacgtgtcccctttttcgctggggtg

SEQ ID NO: 294 - DNA, 2126 bp, Zea mays
  VARIATION (310)..(310): /replace="c" or "g" or "t"
  misc_feature (310): /note="Nucleotide given in the sequence has no preference with respect to those in the annotation for said position"
  VARIATION (382)..(383): /replace="c" or "g" or "t"
  misc_feature (382)..(383): /note="Nucleotides given in the sequence have no preference with respect to those in the annotations for said positions"
  VARIATION (403)..(403): /replace="c" or "g" or "t"
  misc_feature (403): /note="Nucleotide given in the sequence has no preference with respect to those in the annotation for said position"
  VARIATION (423)..(423): /replace="c" or "g" or "t"
  misc_feature (423): /note="Nucleotide given in the sequence has no preference with respect to those in the annotation for said position"
  source: /note="Zea mays BAC clone full insert sequence contig bacb.pk243.l15.fis52"
ttatgattgaaaatgaaaaattgcttgctaaggctaaagattttgatgtttgcaatactgaccttagaactaagaatgatatattgcatgctaaggttgttgaattaaaatcttgcaaaccctctacatctaccgttgagcacacttctatttgcactagatgtagagatattgatgttaatgctattcatgatcacatggctttaattaaacaacaaaatgatcatatagcaaaattagatgctaaaattgccgagcataacttagaaaatgaaaaatttaaatttgctagaagtatgctctatagtgagagacgccctggcatcaaggatgacattggcttccaaaggggagacaatgtcaaacttagtgcccctcctaaaaagatatctattttgttaaaggcaagcctccatgcctcaagataacgaggggtacattttgtaccctgccggttatcctaagagcaagattaggagaattcactttaggaagtctcactctggcccaaatcatgcttttatgtataagggtgagacatctagttctaggcaaccaacccatgctaagttgcctaagaagaaaactcctagtgcatcaaatgaacatggtctttcatttaaaacttttgatgcatcttatgttttgactaacaaatccggcaaggtagttgccaaatatgttgggggcaagcacaaggggtcaaagacttgtgtttgggtacccaaagttcttatgtctaatgccaaaggacccaaaaccatttgggtacctaaagtcaagaactaaacttgttttgtaggtttatgcatccggtggctcaagttggataatcgacagcgggtgcacaaaccatatgacaggggagaagaagatgttctcctcctatgagaaaaaccaagatccccaacgagctatcacattcggggatggaaatcaaggtttggtcaaaggattgggtaaaattgctatatctcctgaccattctatttccaatgtttttcttgtagattctttagattacaatttgctttctgtatctcaattatgcaaaatgggctacaactgtcttttcactaatgtaggtgtcactatctttagaagaagtgatgattcaatagcatttaagggagtgttagagggtcagctatacttggtgaattttgataaagctgaactcaacacttgcttaattgctaagactaacatgggttgactctggcaccgccgactagcccatgttgggatgaagaatcttcataagcttctaaagggagaacacattttaggattaacagatgttcattttgagaaagacagggtttgtagcgcatgccaagcaggaaagcaagttggtgcccatcatccacacaagaacatcatgacgaccgacaggccgcttgagctactccacatggatctattcggcccgattgcttacataagcatcggcgggagtaagtattgtcttgtaatagtggatgattattctcgcttcacttgggtgtctttttacaggaaaaatcacaaacccaagagaccttaaagggattcttgagacgggctcaaaatgagttcggcttaaggatcaagaaaataagaagcgacaatgggacggagttcaagaactctcaaatcgaaggcttccttgaggaggagggcatcaagcatgagttctcttctccctacacgccacaacaaaatggtgtagtggagaggaagaatcgaactctattggacatggcaaggaccatgcttgatgagtacaagacttcggatcggttttgggccgaggcggtcaacaccgcttgctacgccatcaaccggttatatctacatcgaatcctcaagaagacatcctatgaactcctaaccggtaaaaagcccaatatttcatattttagagtctttggtagcaaattccgaaaacgggtgtccgggtgcatacaatgcacgagttttttccaccggaaccatttcttcgtttttcgcaacgaacatgcccaatcaactattctagatccaaaactcatgtttgggttggtttcgcgcaatttcgttgccgcacgtcaccgattccgagaacgggtgtcggggtgcacatgagttttcgccaccggaaccat

SEQ ID NO: 295 - DNA, 1703 bp, Zea mays
  VARIATION (194)..(194): /replace="c" or "g" or "t"
  misc_feature (194): /note="Nucleotide given in the sequence has no preference with respect to those in the annotation for said position"
  VARIATION (1449)..(1449): /replace="c" or "g" or "t"
  misc_feature (1449): /note="Nucleotide given in the sequence has no preference with respect to those in the annotation for said position"
  VARIATION (1482)..(1482): /replace="c" or "g" or "t"
  misc_feature (1482): /note="Nucleotide given in the sequence has no preference with respect to those in the annotation for said position"
  VARIATION (1508)..(1508): /replace="c" or "g" or "t"
  misc_feature (1508): /note="Nucleotide given in the sequence has no preference with respect to those in the annotation for said position"
  VARIATION (1637)..(1637): /replace="c" or "g" or "t"
  misc_feature (1637): /note="Nucleotide given in the sequence has no preference with respect to those in the annotation for said position"
  source: /note="Zea mays BAC clone full insert sequence contig bacb.pk243.l15.fis53"
ccataggaagagcacatcggggacttgccagttctgggaaagatccttggtgtcttggacttcaaagaagcaaaattcggtcgctctttccaccgtcgaagccgagtacattgccgcaggtcattgttgcgcgcaattgctttggatgaggcaaaccctgcgggactacggttacaaattaaccaaagtccctatgctatgtgataatgagtgtgcaatcaagatggcggataatcccgtcgagcatagccgcactaaacacatagccattcggtacattttcttagggatcaccaacaaaagggagatatcgagatttcttacattaatactaaagatcaattagccgatatctttaccaagcctcttgatgaacaaacttttaacaaacttaggcatgagctcaatattcttgattcgcgcaatttcttttgctaaattgcacacatagctcttttatatacctttgatcatatctctttcatgtgctatgactaatgtgttttcaagtgaatttcaaaccaagtcataggaatattgaaagggaattggagtcttcggcgaagacaaaggcttccacttcgcaactcatccttcgtcgtcgctccaaagtcactctccatctttgggggagagagcaaaaggacttcgtctttggtataatcttaactcatttatttatgaccaaaggggaataaaggacttcaagggctctaataattccgtttttggcgattcatgccaaagggggagaaagtttgtatgagcccaaagcaaaaggaccgcaccaccaccaatttcaaaaacttagtttttcacaaagtattctcaattggtatcctattgtgttcaaaagggggagaaagtagtatttcaaaaatgatatatcaaaaccctcttgaacactaagaggaggatctcatttagggggagttttgtttagtcaaaggaaaagcatttgaaacagggggagaaaatttcaaatcttgaaaatgctttgcaaaatctcattcatttacctttgactatttgcaaaagaactttgaaaaggatttacaaaatagtttgcgaaaacaaaacatatggtgcaagcgtggtccaaaatgttaaaaacgaagaaacgatccatgcatatcttgtaagtatttatattggctcaattccaagcaacctttgcacttacattatgcaaactagttcaattatgcacttctatatttgctttggtttctgttggcatcaatcaccaaaaagggggagattgaaagggaattaggcttacacctagttcctaaataattttggtggttgaattgcccaacacaaataattggactaactagtttgctctagtgtataagttatacaggtgtaaaaggttcacacttagccaataaaaagatcaaatattggattcaacaaaggagcaaatggacaaccgaaggcacactctggtctagggcaccggaactgtccggtgtaacaccggacagtgtccggtgcaccaaccggacagtgtccggtgcaccagaggactccaactcaaacttgccaccttcgggaatttccagaggcactccgctacattcaccagacatggtccggtgtacacccggaaagtgtccggtggctccaaaggaagaacaagcctccggaaattccccatcctccgggaaaaaacccccggctgggttccccattaa

SEQ ID NO: 296 - DNA, 1037 bp, Zea mays
  source: /note="Zea mays BAC clone full insert sequence contig bacb.pk243.l15.fis54"
caatccactactttaggtccaaaactcatgtttggggtggtttcgcgcaatttcgttgccgcacgtcaccaattccgaaaacgggtgtcggatgcatgcaaagcatgagttttcgccaccggaaccattgcttcgtttttcgcaatgaacattcccaatcgactactttaggtccaaaaactcgtgtttggggtggtttcgcgcaatttcgttgccgcacgtcacccattccgaaaacggtagtcggggtgcattaaaagcatgagttttcgccaccagaaccatttcttcgtttttcgcaacgaacatgcccaatccacaactttgggtccaaaactcatgtttggggtggtttcgcgcaatttcgttgccgcacgtcacccattccgaaagccggtgtcggggtgcatacaaagcacgagttttcgccaccagaaccatttcttcgtttttctcaacgaacatgcccaatccactactttaggtccaaaactcatgtttgggttggtttcacgcaatttcgttgccgcacgtcacccattccgaaaacgggtgtctgggtgcatatacaaagcacgagttttcgccaccggaaccatttcttcgtttttcgcaacgaacatgcccaatccactactttaggtccaaaactcatgtttggggtggtttcgcgtaatttcgttgccgcacgtcacccactctgaaaacgggtgtcggggtgctgagcacgagttttcggcaccggaaccatttcttcatttttctcaacgaacatgctcaatccactactttaggtccaaaactcatgtttggggtggtttcgcgcaatttcgttgccgcacgtcacccattccgaaaacgggtgtcggatgcatacaaagcatgagttttcgccaccgaaaccatttcttcatttttcgcaacgaacatgcccaatcgactactttaggtccaaaaatcatgtttggggtggtttcgcgcaatttcgttgccgcacgtcacccattccgaaaacggtagtcgggtgcattaaaagc

SEQ ID NO: 297 - DNA, 1681 bp, Zea mays
  source: /note="Zea mays BAC clone full insert sequence contig bacb.pk243.l15.fis55"
tccaaaaacaggtgtcagggtgcatacaagcacgagtttttgccaccggaaccatttcttcgttttgcgcaacgaacatgcccaatccactactttaggtccaaaactcatgtttggggtggtttcgcgcaatttcgttgccgcacgtcacccattccgaaccattttttcgctttttgcaacgaacatgcccaatccactactttaggttcaaaactcatgtttggggtggtttcgcgcaatttcgttgccgcacgtcacccattacaaaaacgggtgtcgggcggggtgcatacaaagcacgagtttttgccaccagaaccaattcttcgtttttcgcaacgaacatgcccaatccactactttaggaccaaaacacatgtttggggtggtttcacgcaatttcgttgccgcatgtcacccattccgaaaacgggtgtcggggtgcatacaaagcacgagttttcgccaccagaagcatttcttcgtttttctcaacgaacatgcccaatccactactttaggttcaaaactcatgtttgggctggtttcacacaatttcgttgccgcacgttacccattccgaaaacgggtgttgggtgcatacaaagcatgagttttcgccaccggaaccatttcttcgtttttcgcaacgaacatgcccaatccactactttaggtctgaaactcatgtttggggtggtttcgcgcaatttcgttgccgcacgtcacccattcccaaaacgggagttggggtgcatacaaagcatgagtttttgccaccggaaccatttctttgtttttcgcaacgaacatgcccaatccactactttaggtccagaactcatgtttggggtggtttcgcacaatttcgttgccgcacgtcacccattccgaaaacgggtttcggggtgcatacaaagcacgagatttcgccaccggaaccatttcttcatttttcgcaacgaacatgcccaatccactactttaggtccaaaactcatgtttggggtggttttgcgcaatttcgttgccgcacgtcacccattccgaaaacgggtgtcggggtgcatacaaaggttgagttttcgccaccggaaccatttcttcgtttttcgcaacgaacatgccccatccactactttaggtccaaaactcatgtttggggtggtttcgcgcaatttctttgccgcacgtcacccattccgaaaacgggtgtcccggtgcatacaaagcacgtgttttttccaccggaaccatttcttcgtttttcgcaacgaacatgcccaatccactattttaggtccaaaactcatgtttggggtggtttcacgcaatttctttgccgcacgtcacccattccgaaaacgggtgtccgggtgcatacaaagcacgtgttttttccaccggaaccatttcttcgtttttcgcaacgaacatgcccaatccactattctaggtccaaaactcatgtttggggtggttttgcgcaatttcgttcccgcacgtcacccattccgaaaacgggtgtcggggtgcatacaaagcacgagttttcgccactggaaccatttcttcgtttttcgcaacgaacatgcccaatccactacttgaggtccaaaactcatgtttggggtggtttcgcgcaatttcgttgccgcacgtcacccattccgaaaac

SEQ ID NO: 298 - DNA, 2445 bp, Zea mays
  source: /note="Zea mays BAC clone full insert sequence contig bacb.pk243.l15.fis56"
tgtgttggggtggttttgcgcaatttcgttgccgcacgtcacccattccgaaaacgggtgtcggggtgcatacaaagaacgagtttttgccaccggaaccatttctttgtttttcgcaacgaacatgcccaatccactactttaggtccagaactcatgtttggggtggtttcgcacaatttcgttgccgcacgtcacccattccgaaaacgggtgtcggggtgcatacaaagcacgagatttcgccaccggaaccatttcttcatttttcgcaacgaacatgcccaatccactactttaggtccaaaactcatgtttggggtggttttgcgcaatttcgttgccgcacgtcacccattccgaaaacgggtgtcggggtgcatacaaaggttgagttttcgccaccggaaccatttcttcgtttttcgcaacgaacatgccccatccactactttaggtccaaaactcatgtttggggtggtttcgcgcaatttctttgccgcacgtcacccattccgaaaacgggtgtcccggtgcatacaaagcacgagttttttccaccggaaccatttcttcgtttttcgcaacgaacatgcccaatccactactttaggtccaaaactcatgtttggggtggtttcgcgcaatttcgttgccgcacgtcacccattccgaaaacggtagtccgcatacaaagcatgagtttttgccaccggaaccatttcttcgtttttcacaacgaacatgcccaatccactactttgggtccaaaactcatgtttagtgtgttttcgcgcaatttcgttgtcgtacgtcacccattcccaaaacgggtgtcggggtgcatacaaagcacgacttttgccaccgaaaccaattcctcgtttttcgcaacgaacatgcccaatccacttctttaggtccaaaactcatgtttggtgtggtttcgcgctatttcgttaccgcacgtcacccattccgaaaacgggtgccggggtgcatacaaagcacgagtttttgccaccggaacgatttcttcgtttttcgcaacgaacatgcccaatccactactttaggtccaaaactcatgtttgggttggtttcgagcaatttcgttgccgcacgtcacccattccgaaaacgggtgtcagggtggatacaaagcacgagttttcgccaccggaaccatttctccgtttttcgcaacgaacatgcccaatccactactttaggtccaaaactcatgttttgggtggtttcgtgcaatttcgttgccgcacgtcaccaattccaaaaacaggtgtcagggtgcatacaagcacgagtttttgccaccggaaccatttcttcgttttgcgcaacgaacatgcccaatccaatactttaggtccaaaactcatgtttggggtggtttcgcgcaatttcgttgccgcacgtcacccattccgaaccattttttcgcttttagcaacgaacatgcccaatccactactttaggttcaaaactcatgtttggggtggtttcgcgcaatttcgttgccgcacgtcacccattacaaaaatgggtgtcgggcggggtgcatacaaagcacgagtttttgccaccagaaccaattcttcgtttttcacaacaaacatgcccaatccactactttaggtccaaaactcatgtttggggtggtttcgcgcaatttcgttgccgcatgtcacccattccgaaaacgggtgtcggggtgcatacaaagcacgagttttcgccaccagaagcatttcttcgtttttctcaacgaacatgcccaatccactactttaggtccaaaactcatgtttgggctggtttcacgcaatttcgttgccgcacgttacccattccgaaaacgggtgttgggtgcatacaaagcatgagttttcgccaccggaaccatttcttcgtttttcgcaacgaacatgcccaatccactactttaggtctgaaactcatgtttggggtggtttcgcgcaatttcgttgccgcacgtcacccattccgaaaacaggagttggggtgcatacaaagcatgagttttcgccaccgaaaccatttcttcgttttttgcaacgaacaaggtagtaaatagaactttatctaccatgcttagggctgttttagacaagaatttgagacgttgggaggattgcttgcctcatgttgaatttgcttacaatcatgccacgcattcttctacaaagatgtgccctttccagattgtttatggttacattcctagggcacctattgatttgatttcacttaatgctgcgaacgccccacatgtagatgcttctgcacatgttgaacaaatgattaccatacatgaacaaacgaaacagaacattgctgctactaatacaaaaaatcaggttgctggtagtaaaggaagaaaacatgttacttttgaacctggt

SEQ ID NO: 299 - DNA, 2292 bp, Zea mays
  source: /note="Zea mays BAC clone full insert sequence contig bacb.pk243.l15.fis57"
ttttcggaatgggtgatgtgcggcaacgatatagcgcgaaaccaccccaaacatgagttttggacctaaattggtggattgggcatgttcgtgcgaaaaatgaagaattggttccggtggcaaaaactcgtgctttgtattcaccccgcccgacacccgtttttgtaatgggtgacgtgcggcaatgaaattgcgtgaaaccaccccaaacatgagttttggacctaaagtattggattgagcatgttcgctgcgcaaaacgaagaaatggttccggtggcaaaaactcgtgcttgtatgcaccctgacacccatttttggaattggtaatgtgcggcaacgaaattgcacaaaatcaccccaaacatgagttttggacctaaagtagtggattgggcatgttcattgcgaaaaacgaagaaatggttccggtggcgaaaactcatgctttgaatgcacccgacacccgttttcagaatgggtgacgtgtggcaacgaaattgcgcgaaaccaacccaaacatgagttgtggacctaaagcagtggattgggcatgttcgttgcgaaaaacgaagaaatggttccggtggcaaaaactcgtgctttgtatgcaccccgacacccgttttcggaatgggtgacgtgtggcacgaaaccaccccaaacatgagtattggacctaaagctgtggatttggcaagttcgttgcgaaaaacgaagaattggttccggtggcaaaaactcgtgctttgtatgcaccccgacacccgttttgggaatggggtgacgtatgacaacgaaattgcgcgaaaccaccccaaacatgagttttggacctaaagtagtggattgggcatgttcgttgcgaaaaacgaagaaatggttccggtggagctttgtatgcaccccgacacccgttttgggaatggggtgacgtatgacaacgaaattgcgcgaaaccaccccaaacatgagttttggacctaaagtagtggattgggcatgttcgttgcgaaaaacgaagaaatggttccggtggcaaaaactcgtgttttgtatgcaccccgacacccgtattcggaattggtgacgtgcggcaacgaaattgcgcgaaaccaccccaaacatgagttttggacctaaagtagtggattgggcaagttcgttgcgaaaaacgaagaattggttccggtggcgaaacctcaagctttgtatgcaccccgacacccgttttcgaaatgggtgacgtgcggcaacgaaattgcgcaaaaccaccccaaacatgagttttggacctaaagtagtggaatgggaatgttcgttgcgaaaaactatgaaatggttccggtggcaaaaactcgtgcttggatgcaccctaacaatcgtttttggaatgggtaacgtgcggcaacgaaattgcgcgaaaccaacccaaacatgagttttggacctaaagtagtggattgggtatgttcgttgagaaaaacgaagaaatggttccggtggcaaaaactcgtgctttgtatgcaccccaacacccgtttttggaatgcgtgacgtccggcaacgaaattgcgcgaaaccaccccaaacatgagttttggacctaaagtactggaatgggcatgttcgttgcgaaaaacgaagaaatgttccggtggcgaaaactcatgatttgtatgcacccgacacccgtttttggaatgggtgacgtgcggcatcgaaattgcgggaaaccaccccaaacatgagttttggacctaaagtagtggattaggcttgtttgctgcgaaaaacgaagaaatggttccggtggcgaaaactcatgctttgtatgcacccgacacccgttttcggattgggtaacgtgcggcaacgaaattgcgcgaaaccaccccaaacatgagttttggacctaaagtagtggattgggcatgttcgttgagaaaaacgaagaaatggttctggtggcgaaaactcgtgctttgtatgcaccccgacaccggttttcggaatgggtgacgtgcggcaacgaaattgcgcgaaaccaccccaaacatgagttttggacccaaagttgtggattgggcatggtcgttgcgaaaaatgaagaagtggttccggtggcgaaaactcatgcttttaatgcaccccgactaccgttttcgggatgggtgacgtgcggcaacgaaattgcgcgaaaccaccccaaacatgatttttggacctaaagtagtcaattgggaatgttcattgcgaaaaacgaagaaatggttccggtggcgaaaactc

SEQ ID NO: 300 - DNA, 1840 bp, Zea mays
  source: /note="Zea mays BAC clone full insert sequence contig bacb.pk243.l15.fis58"
ggttccggtggcgaaaactcgtgctttgtatccaccttgacacccattttcggaatgggtgacgtgcggcaacgaaattgtgcgaaaccaacccaaacatgagttgtggacctaaagtagtggattgggcatgttcattgcgaaaaacgaagaaatggttccggtggcaaaaactcgtgctttgtatacaccccgacaccctttttcggaatgggtgacgtgcggcgacaaaatagcgcgaaaccacaccaaacatgagttttggacataaagtagtggattaggcatgttcgtagcgaaaaatgaagaattggttccggtggcaaaagtcgtgctttgtatgcaccccgacacccgttttggaaatgggtgacgtacgacaacgaaattgcgcgaaaccacaccaaacatgagttttggacctaaagtagtggattgggcatgttcgttgcgaaaaacgaagaaatggttccagtggcgaaaactcatgctttgtatgcacctcgacacctgttttcggaatatgtgacgtgccgcaacgaaattgcgtgaaaccaccccaaacatgagttttggacctaaagtagtggattgggcatgttcattgtgaaaaacgaaaaatggttccggtggcgaaaactcgtgctttgtatccaccttgacacccattttcggaatgggtgatgtgcggcaacgaaattgtgtgaaaccaacccaaacatgagttgtggacctaaagtagtggattgggcatgttcattgcgaaaaacgaagaaatggttccggtggcaaaaactcgtgctttgtatgcaccccgacaccctttttcggaatgggtgacgtgcggcgacaaaatagcgcgaaaccacaccaaacatgagttttggacataaagtagtggattaggcatgttcgtagcgaaaaatgaagaattggttccggtggcaaaagtcgtgctttgtatgcaccccgacacccgttttggaaatgggtgacgtacgacaacgaaattgcgcgaaaccacaccaaacatgagttttggacctaaagtagtggattgggcatgttcgttgcgaaaaacgaagaaatggttccagtggcgaaaactcatgctttgtatgcacctcgacacctgttttcggaatatgtgacgtgccgcaacgaaattgcgtgaaaccaccccaaacatgagttttggacctaaagtagtggattgggcatgttcattgtgaaaaacgaaaaatggttccggtggaaagaactcgtgctttatgtgcaccccgacacccgttttcggaatgggtgacgtgaggcaacgaaattgcgcgaaaccaccccaaacatgagttttggatctaaagcagtggattgggcattttcgttgcgaaaaacgaagaaatggttctggtggcgaaaactcatgctttgtatgcaccccgacacccgctttcagaatgggtgacgtgcggcaacgaaattgcgcgaaaccaccccaaacatgagttttggacccaaagttgtggattgggcatgttcgttgcgaaaaacgaagaaatggttctggtggcgaaaactcatgcttttaatgcaccccgactaccgttttcggaatgggtgacgtgcggcaacgaaattgcgcgaaaccaccccaaacacgagtttttggacctaaagtagtcgattgggaatgttcattgcgaaaaacgaagcaatggttccggtggcgaaaactcatgctttgcatgcatccgacacccgttttcggaattggtgacgtgcggcaacgaaattgcgcgaaaccaccccaaacatgagttttggacctaaagtagtggattgg

SEQ ID NO: 301 - DNA, 1357 bp, Zea mays
  source: /note="Zea mays BAC clone full insert sequence contig bacb.pk243.l15.fis59"
tagtggattgggcatgttcgttgtgaaaaacgaagaaatggttccggtggcaaaaactcatgctttgtatgcaccccggactaccgttttcggaatgggtgacgtgcggcaacgaaattgcgcgaaaccaccccaaacatgagttttggacctaaagtagtggattgggcatgtttgttgcgaaaaacgaagaaatggtttctgtggcgaaaactcatgcttaggggtgtaatcggatcggatacggacggatatcaatgaaaccatatttgttttcatatttttagtcggaatcgaatgcggatagcttcgaatacgaatacaaatacggatgttctcgaatacaaaaacggatagtcgtggatcgaatgcggagctaatcagacacggatagcgtcggtaacgaatatttttgtcggatatcgtgtaagacaccattccacacatatcatagttgtaatcatttagcccctcctttagtccaaacatttttgaggattatatgtgcacacatgctacaccttcataaaaatccatgaatttctaaggctattttgagtattattaatttctttatgtagaaaatcattaaaatgtaattaaattcataaaatattgataactatgatatatggtttcacatgttattatgatatgtggtttcacttattattatggtggtttcacatgtaatcattacgggtttcacaaataagtggaaatgaaatgaaataattgatgacatcttgtggtttttatagttcaaacatttttgaggatgctatatggacatatgttactcatacgccaaattttgtgaatttctgagactatttgtatattattaatttctttttgcagaaaatcatcaaaatgcatttaaatccataaaatattatagtatcgaccaaaaattgcaaataagttatcaagactaataaacattccataagaagataacctcaagtccctacatgaaaatgagaaagtgaagtaaaggttatgttgaaacttggtgtcggggaccataattaggggtaccctcaaggctcctaattctcagctggtaacccccatcagcataaagctgcaaaggcctgatgggtgcgattaagtcagggatcagtccattcgagggactcgatcatgcctcgcccgagcctagcctcggacaagggcaaacgaccccggaggatctccgtctcgcccgaggcccccctccagcggcgaacatatttccggctcgcccgaggccctgtcttcgccaagaagcaaccctgaccaaatcgccgcaccgaccgaccaaatcgcaggagcatttaatgcaaaggtggcctgacaactttatcctgatgcg

SEQ ID NO: 302 - DNA, 1801 bp, Zea mays
  source: /note="Zea mays BAC clone full insert sequence contig bacb.pk243.l15.fis60"
cctgcggagtaaccacataaccaagaaacgagacacgttgcgtgcaaaatgtgcacttttccatgttaccaaacaagcgagcagcacgcaaagcatcaaaaacagcacgcaaatgttctaaatgctcctctatagacttgctgtaaataaggatatcatcgaaataaacagcaacaaacaaacctatgaaggcccgtagaacttcattcattaaacgcataaaggtgctgggagcattagtcaatccaaatggcataaccaaccattcatataaaccaaatttcgttttaaaagccgttttccattcatcaccgagtttcattctaatctgatggtaaccgctacgcaaatcaaccttagagaaaataacggcaccactaagctcatctaacatatcatcaaggcgtggaataggatatcgataacgaactgtgatgttattaatagcacgacaatctacgcacatacgccatgacccatctttctttggaacgagtaaaacaggaaccgagcaagggctaagagactcacgaatgtaacctttatcaagcagcgtctgcacctggcgctggatctccttcgtctcatctggatttgtacggtacggggcgcggttcggaagagaagcgccggggatgagatcgatctgatgctcaatgccacggaggggaggaagacccggtggtaagtccgtaggaaaaacatcaacatactcctgcaaaaggttaacaacagcagggggtatatccaaagacggtgcatcatcaagcggaacaagcatgcgcgagcatacaagtgcataacagggcatatgagcttcatggagatcatcaaaatcagcacgagtagcaagtaaaacaggagagtgcaacttgatttcagatttaataggtgcggctgatgttgatttgacttgttgtgcagttttagcagccctagtaaggtcatctttcaaaatttggtcaggggtcattggatgtataattattttctggcctttaaacatgaaagaataatgatttgaacgaccatgatgtaaactatcagtatcatattgccaaggccgacctaataacaaagagcatgcttccataggaataacatcgcaatcagcataatcagaataagaacccaacgaaaaggggacacgtaccgaacgtgttacctttattttaccaccatcattaagccattgaatgtgatacggatgtggatgtgtgcgagtgggcaaggataatttctctaccaacgctgtacttgccaaattgttgcagctgccactatcgatgatgatgcgaatcgaccgttcgtgcacgacgcccttggtatggaatagagtgtgtcgctgatttttttcggcctgggcaacctgtgtgctgagaacacgctgcacaacaagactctcatacctatctgcgtcgatgggatcaacatggacttcctcattttctgcatggttagtggcaatcatagcatgactagtttcctcagaatcactggctgaagagtactcaccattgtctcgtataagcaaggtacgcttgtttgggcagtcccaaatcatgtgcccaaaccctctgcaacgatggcactgaatatcccgtgtacgtcctgtggaagaagcggcgcctttggcaggtggcgccactggcttggtcgtccctgtgcgcgatgtagtgctaggcgtagaaggtgcagggctggaaggagttgagctgtgtgttggaccccggcctgcaaaagagttagtatatgtctttgatcgtcgtccctgcacttcacgttcagctttgcaagcata

SEQ ID NO: 303 - DNA, 1524 bp, Zea mays
  source: /note="Zea mays BAC clone full insert sequence contig bacb.pk243.l15.fis61"
tccaacatttccaaccaagcaagcacatcatcaaatttaaagatatacttggttgaggagcacacgctagagtcgaggacgactctattacaagaaggggaggatgatgaggacatcactgccatcaatacaaccacaccagcgacccccttcaccatttaatcatggaccagtgaaacgagtccgtgcatgtaaatttaattatcaggtgaactcgttccttgttgaagctaatcattccttaaatgaggtactaataccttgtgattactttattatgctaaggtgtttgggaggtgaaccatctagaatttgagaagtcaacaaggcaataaaagctgctccacttgatgggattttgtaactgcagcaagtgcaagttgaagaggccatatctttcaactcccaaggccaatgaaggcaaataagcacttgatggaaagcactcttcgtctacttcttggtggagaaataatcaattagagataccaaataaggcgtccagaaactgtcgagagaacttcttgactccaccagtccgagggaattcgtaactgcagcaagcaccatattaaatggagcatatctttcatctcctaaggttgtttagtgcaaataagtacttgttggaaagctctcttcgtctactttctggcggctgaagaatcaatgggagaaaccaaacgacacgtccagaaactgtcgagagagcttcgttctccaccagaacttctttctattcctctatttaagcaactagcagccaccaaagaacttgggttttttgtttgatgtaagtttagcctttggtacttccttgtaaacgcgtgtgtcggctagaccacccggatacttgaaacagaaccccaactctatcagatccgtgagcgtctgctttttatcttgttcttgcttgttctcgattgcttgcaggttcaaggttgttcttggcacggcaacagcagcaacaacaggagccagtgtaactatcgctaaggtgcagcacccttgtggttgttgtagtcggatagcacaacgtcgacctccaccccaaatcgtagttatcaggagacgatgtacctgtcgctcaaggcgccacaccatcttggttgtggtagtcgggcagccaacgtcgttctccaacaagttttccacctccatcatctctcatcgaaagatcgggcacccttctacccattgggtttatcgtagtgcatgttcaatttcttcagaatcactagcggaagagtactcaccatcgtcacgaatgagcaaagtgcgcttgtttgggcagtcccgaatcacatggccaaatcctctatagcgatgacactgaatatcccgtgtacgacctgtgggtggggcagtgctggctggtttggtcgtcttctcgagtggagtagtggtggacgtggatggcgcagggggaactggtgctgaggtggatgtcgagcttcgtcctgcaaaagggttagaatatggcttcgagcggcgtccctgcacttcacgttcagctttgcaagc

SEQ ID NO: 304 - DNA, 1436 bp, Zea mays
  source: /note="Zea mays BAC clone full insert sequence contig bacb.pk243.l15.fis62"
atcgattaacttgattcggaatgggtgacgtgcggcaacaaaattgcgcgaaaccaccccaaacatgagttttggacctaaagtagtagattgagcatgttcgttgagaaaaatgaagaaatggttccggtgccgaaaactcgtgctcagcaccccgacacccgttttcagagtgggtgacgtgcggcaacgaaattgcgcgaaaccaccccaaacatgagttttggacctaaagtagtggattggacttgttcgctgcgaaaaacgaagaaatggttccggtggcgaaaagtcatgctttgtatgcacccgacacccgttttcggaatgggtaacgtgcggcaacgaaattgcgcgaaaccaccccaaacatgagttttggacctaaagtagtggattgggcatgttcgttgagaaaaacgaaaaaatggttccaatggcgaaaactcgtgctttgtatacaccccgacaccagcttttggaattggtgacgtgcggcaacgaaattgcacgaaaccaccccaaacatgagttttggacctatagtagtggattgggcatgttcgttgcgaaaaacgaagaaatggttccggtggcgaaaactcgtgctttgtatccacaatgacatccgttttcggaatgggtgacgtgcggcaacgaaattgcgcgaaaccaacccaaacatgagttttggacctaaagtagtggattgggcatgtttgttgcgaaaaacgaagaaatggtttcggtggcaaaaactcgtgctttgtatgcaccccgacatccgttttcggaatgggtgacgtgcggcaacgaaatagtgcgaaaccacaccaaacataagttttggacctaaagtagtggattgggcatgttcgttgcgaaaaacgaagaattggttccggtggcaaaagtcgtgctttgtatgcaccccgacacacgtttggggaatgggtgacgtacgacaacaaaattacgcgaaaccgcaccaaacatgagttttggacccaaagtagtggattgggcatgttcgttgcgaaaaacgaagaaatggttccggtggcgaaaactcatgctttgtatgcaccccgactcccgttttcggaatggttgatgtgcggcaacgaaattgcacaaaaccaccccaaacatgagttttggacctaaagtagtggattgggcatgttcgttgcgaaaaacgaagaaatggttccggtggcgaaaactcatgctttgtatgcacccgacacccgttttcggaatgggtgacgtgcggcaacgaaattgcgtgaaaccaccccaaatatgagttttggacctaaagtagtgtattgggcatgttcgttgcgaaaaatgaagaaatggttccggtggcgaaaactcatgctttgtatgcacccccgactcccgttttcggaatgggtgacgtgcggcaa

SEQ ID NO: 305 - DNA, 2341 bp, Zea mays
  source: /note="Zea mays BAC clone full insert sequence contig bacb.pk243.l15.fis63"
tttttctcaacgaacatgcccaatccactatttaggtcaaaaactcatgtttggggtggtttcgcgcaatttcgttgccgcacgttacccattccgaaaacgggtgtcggggtgcatacaagcacgagtttttgctaccggaaccgtttcttcgttttttgcaacaaacatgcccaatccactactttaggtccaaaactcatgtttggggtggtttcgcgcaatttcgttgccgcacgtcacccattccgaaaacgggtgtcggatgcatgcaaagcatgagttttcgccaccggaaccattgcttcgtttttcgcaatgaacattccccatcgactactttaggtccaaaaatcatgtttggggtggtttcgcgcaatttcgttgccgcacgtcacccattccgaaaacgggagtcggggtgcattaaaagcatgagttttcgccactagaaccatttcttcgttttttgcaacaaacatgcccaatccacttctttaggtccaaaactcatgtttggggtggttccgcgctatttcgttgccgcacgtcacccattccgaaaacgggggtcggggtgcatacaaagcacgagtttttgccaccggaaccatttcttcgtttttgcaacgaacatgcccaatccactactttaggtctaaaactcatgtttgggttggtttcgcgcaatttcgttgccgcacggaacccattccgaaaacgggtgtcagggtggatacaaagcacgagttttcgccaccggaaccatttcttcgtttttcgcaacaaacatgcccaatccactactttaggtccaaaactcatgtttggggtggtttcgcgcaatttcgttgccgcacgtcaccaattccgaaaacgggtgtcggatgcatacaaagcatgagttttcgccaccgaaaccatttcttcgtttttcgcaacgaacatgcccaatccactactttaggtccaaaactcatgtttggtgtggtttcgcactatttcgttgccgcacgtcacccattccgaaaacgggtgtcggggtgcatacaaagcacgagtttttgccaccgaaaccatttcttcgtttttcgcaacgaacatgcccaatccactactttaggtccaaaacttatgtttggggtggtttcgcgcaatttcgttgccgcacgtcacccattccgaaagctggtgtcggggtgtatacaaagcacgagttttcgccattggaaccatttcttcgtttttctcaacgaacatgcccaatccactactttaggtccaaaactcatgtttggggtggtttcgcgcaatttcgttgccgcacgttacccattccgaaaacgggtgtcgggtgcatacaaagcatgacttttcgccaccggaaccatttcttcgtttttcgcaacgaacaagtccaatcgactactttaagtccaaaaatcatgtttggggtggtttcgcgcaatttcgttgccgcacgtcacccactccgaaaacggtagtcggggtgcattaaaagcatgagttttcgccaccagaaccatttcttcgtttttcgcaacgaacatgcccaatccacaactttgggtccaaaactcatgtttggggtggtttcacgcaatttcgttgccgcacgtcacccattccgaaagccggtgtcggggtgcatacaaagcacgagttttcgccaccagaaccatttcttcgtttttctcaacgaacatgcccaatccactactttaggtccaaaactcatgtttggggtggtttcgcgcaatttcgttgccgcacgttacccattccgaaaacgggtgtcgggtgcatacaaagcatgagttttcgccaccggaaccatttcttcgtttttcgcagcgaacaagcctaatccactactttaggtccaaaactcatgtttggggtggtttcgcgcaatttcgatgccgcacgtcacccattccgaaaacgggtgtcgggtgcatacaaatcatgagttttcgccaccggaaccatttcttcgtttttcgcaacaaacatgcccaatccactactttaggtccaaaactcatgtttggggtggtttcgcgcaatttcgttgccgcacgtcacccattccgaaaacggtagtgggggtgcatacaaagcatgagttttcgccaccggaaccatttcttcgtttttcacaacgaacatgcccaatccactactttgggtccaaaactcatatttggtgtgttttcgcacaatttcgttgtcgtacgtcacccattcccaaaacgggtgtcgaggtgcatacaaagcacgacttttgccaccggaaccaattctttgtttttttgca

SEQ ID NO: 306 - DNA, 2177 bp, Zea mays
  source: /note="Zea mays BAC clone full insert sequence contig bacb.pk243.l15.fis64"
gctttaggtccaatactcatgtttggggtggtttcgtaccacacgtcacccattccgaaaacgggtgtcggggtgcatacaaagcacgagtttttgccaccggaaccatttcttcgtttttcgcaacgaacatgccaatccattactttaggtccaaaactcatgtttgcggtgatttctgcgcaatttcgttgccgcacgtcacccattccgaaaacgggtgtcggggtgcatacaaagcttgagtttttgccaccggaaccatttcttcgtttttcgcaatgaacatgcccaatccactactttaggtccaaaactcatgtttggggtggtttcgcgcaatttcgttgccgcacgtcacccattccgaaaactggtgtcggggtgcatacaaagcttgagtttttgccaccggaaccatttcttcgtttttcgcaatgaacatgcccaatccactagtttaggtccaaaactcatgtttggggtggtttcgcgcaatttcgttgccgcatgtcacccattccgaaaacgggtgtcgggcggggtgcatacaaagcacgagttttttccaccggaaccatttcttcgtttttcgcaacgaacatgtccaatccactacattaggtccaaaactcatgtttggggtggtttcgcgctatatctttgccgcacgtcacccattacgaaaacgggtgtcggggtgcatagaaagcacgagtttttgccactggaaccatttcttcgtttttcgcaacgaacatgcccaatccactactttaggtccaaaaatcacgcgcaatttcgttgccgcacgtcacccattccgaaaacgggtgtcggggtgcatacacaacacgtgttttcgccaccggaaccatttcttcgtttttctcaacgaacatgcccaatccactactttaggtccaaaactcatgtttggggtggtttcgcgctatatcattgccgcacgtcacccattccgaaaacgggtgtcggggtgcatacaaagcacgagtttttgccaccggaaccatttcttcgtttttcgcaacgaacatgcccaatccacttctttaggtccaaaactcatgtttggtgtggtttcgcgctatttcattgctgcacgtcacccattccgaaaacgagtgtcggggtgcacacacagcacgagttttcgccaccggaaccatttcttcgtttttctcaacgaacatgcccaatccactactttaggtccaaaactcatgtttggggtggtttcgcgcaatttcgttgccgcacgttacccattccgaaaacgagtgtcggggtgcatacaaagcacgagtttttgccactggaaccttttcttcgcttttcgcaacgaacatgcccaatccactactttagctccaaaactcatgtttggggtggtttcgcgctatatcattgccgcacgtcacccatttcgaaaacgggtgtcgtggtgcatacaaagcacgagtttttgccaccggaaccatttcttcgtttttcgcaacgaacatgcccaatccactgctttaggtccaaaactcatgtttggggtggtttcgcgcaatttcgttgccgcacgtcacccattacgaaccatttttttgctttttgcaacgaacatgcccaatccactactttagatccaaaactcatgtttggggtggtttcacgcaatttcgttgccgcacgtcacccattacaaaaacgggtgtcgggcggggtgcatacaaagcactagtttttgccaccggaaccaattcttcgtttttcgcaacgaacatgcccaatccactactttaggtcgaaaactcatgtttggggtggtttcgcgcaatttcgttgatgcatgtcacccattccgaaaacgggtgtcggggtgcatacaaagcaagagttttcgccaccagaaccatttcttcgtttttcgcaacgaacatgcccaatccactactttaggtctaaaactcatgtttggggtggtttcgcacaatttcttttgcggcacgtcacccattccggaaacggggagtgggggtgcatacaaagcatgagtttttcgccacggaaacattttcttcgtttttccgcaccgaacatgccccattccacctaactttggggcccaaaactccatgtttggggtgggtttcccgcaatttcct

SEQ ID NO: 307 - DNA, 2609 bp, Zea mays
  VARIATION (1532)..(1532): /replace="c" or "g" or "t"
  misc_feature (1532): /note="Nucleotide given in the sequence has no preference with respect to those in the annotation for said position"
  source: /note="Zea mays BAC clone full insert sequence contig bacb.pk243.l15.fis65"
caaggcgctcacactagtgctgttatcaagttcttatccgttcttaccaagccacagtggtgaactgcaaccaacaggtggaaccggtgaaagattggatgagcgattgcgtggagaaacagaaacctgctcgtcgtagaaatatgtggagttgtgggtaggctgcactcaagtcaaggattagcacgatcaaacaataatgcaaagttgaattatagtgcaaaacacgaaactatattgctggccacaggtgcaaaggatggatggaactagcagaaaggcagtaccgtaaatattgtactagtgatgccaaaaaggcactagtagaaatcacaggtgattttgtttttcttttttgtatgattttttgatatttttctcagcacaagaagcaacaagataggagctacacgaagtttcacctaaaacagatatcagatgtggtctacagaaaatcaggaagttctctgaaaagcgtgcgagaactttgacggatttttttctttattttcctgaatttttttgacaattttgtcgaaccccaaacagaccgtaggtaagtttggccggcctcagaatggtgtcaactagctcctgtaaaaatttcagattttttggacacccgagcgaaaagttatgcccggtttacggaaggtacctcaagttatgttctaaaaacgaccgggatgaaacaacagtatcctttctccttcgttatcttttttttctgtttttttgacgtaaccgaaggagaaaaacaaggaaggttgactcggtttgttttttttctgttttttttttcgtaaccgaaggagaaaatcaaggaaacggccgttgactcggtttgttttttctgttttttttgacgtaaccgaaggagaaaaataaggaaacgatgttgactcggtttgtggcgtgatcaaacgggagatggtggcggcgctagggtttgaatggtggaagaacacaatgcaaccagcaacaaatgacgcgaaagcacacaaattcaacaatgcagattattgaaagaaagtgcgaggctcaaaagggtgctgggataagatctaacctgaatttttatgtggttttgtggactgtaggaaaaaaacgctcgataaactcaccgatcaacctggaaatctgataccaattgatgtagctgaggtgcccgatctttcggcgagtagagataattccgatttggcggaagatgacccttgcgatccgactacgacgagcaagcccgaggcgccaatgcaatcgctgaaccaactccctgtggttaccgaccttgctgatgcgagatcggcctgatcacgaagatcgtttcctgtgcgcaatcgaagaacgaacaagaacaagatgcgagcaatctaatctattactcgagggtggagttctgaatacacgaagacagcgcagatttgcgcgtgttcgagagtagctaaggctaacgtaaaacaaaacttaggaaataaaggaggcgcagctcctgtataaatagagagggggcgcagcccctaggggcggcacaaccctaggtcgtccattatgggccgcaattgggctggtcgtctattcttccgggccttcgttctttaacaacatgatgtagttcaattctcttgcacgggcccgagtcactggcccaggtggaaggggtggcgcctgggctggagaaggtgctgctggtgtagatgtgctcgtgttggtgttgatgtccgcatcagtacccaaacaaatctgaaccgtcgtcatgctaaatgggtagaattcattgagtcctttccttacattattaaacacaagaacgggaaggataatgttattgctgatgctttgtctcgtcgctataccatgctgccacagttagattttaaaatctttggtttgcacactgtgaaagatcaatatgttgacgatgctgattttaaagatgcttttggccattgtattaatgggaaaccatggggcaaatttcacatacaggatgggttcctgtttcacgctaacaagctgtgtgttccagctagctcggttcgtcttttgttgttacaggaagcgcatggaggcggtctcatggggcactttggcgtctacaagacacatgaggtgttgactgcccacttcttttggcctcggatgtgcgctgatgttgagcgccttgttgcacgttgcactacttgtcagaaagctaagtcacggttgaacaaccatggtttgtatatgcctttgcctgttcctacttccccttggattgatatttcgatggattttgttttgggattgcctagaactaagaaggggagggatagcatttttgtggttgttgatcgattctccaaaatggctcatttcataccttgtcataagactgatgatgctagcaatgttgctgaattgttttttagagagattattcgtttgcacgatatttccaatacaatagtctcggatcgtgatgctaagtttctcagtcatttttggagatctctgtggaataaattgggaactaaattgctgtttagcaccacttgtcaccctcagactgatggtcaaactaaggtagttaatcgaactttgtctaccatgcttagggctgttttaat

SEQ ID NO: 308 - DNA, 1892 bp, Zea mays
  source: /note="Zea mays BAC clone full insert sequence contig bacb.pk243.l15.fis66"
ctttaggtccaaaactcaagtttggggtggtttcgcgcaatttcgttgtcgtacgtcagcccattcccaaaacgggtgtcagggtgcatacaaagcacgagtttttgcaaccggaaccaattcttcgtttttcgcaacgaacttgcccaatccactactttaggtccaaaactcatgtttggggtggtttcgcgccgcacgtcacccattccgagaacgggtgtcggggtgcatacaaagcatgagtttttccaccggaaccatttcttcgtttttcgcaacaaacatacccaatccactactttaggtccaaaacacatgtttggggtggtttcgcgcaatttcgttgctgcacgtcacccattccgaaaacgggtgttggggtgcatacaaagcacgagtttttgccaacggaaccatttcttcgtttttcccaacgaacatgcccaatccacaacattaggtccaaaactcatgtttggcgtggtttcgcgcaattttgttgccgcatgttacccattccgaaaacgggtgtcggggtgcatacaagcacgagtttttgccaccggaaccatttcttcgtttttcacaacgaacatgcccattccactactttaggtccaaaagtcatgtttggggtggttttgcgcaatttcgttgccgcacgtcacccattccgaaaactggtgtcgggttgcatacaaagtttgagttttcgccaccggaaccatttcttcgtttttcgcaatgaacatgcccaatccactagtttaggtccaaaactcatgtttggggtggtttcgcgtaatttcgttgccgcatgacacccattccgaaaacgggtgtccgggtgcatacaaagcacgagttttttccaccgaaaccatttcttcgtttcgcgcaatttcgttgccgcacgtcaccgattccgagaacgggtgtcggggtgcacatgagttttcgccaccggaaccatttcttcatttttcgcaacgaacatgcccaatccactactttaggtccaaaactcatgtttgggtggtttcgcgcaatttcgttgccgcacgtcacccattccgaatacgggtgtcggggtgcatacaaagcacgagtttttgccaccggaaccatttcttcgtttttcgcaacgaacatgcccaatccactactttaggtccaaaactcatgtttggggtggtttcgcgcaatttcgttgtcatacgtcaccccattcccaaaacgtgtgtcggggtgcatacaaagcacgagtatttgccatcggaaccaattcttcgtttttcgcaacgaacttgccaaatccactgctttaggtccaatactcatgtttggggtggtttcgtgccacacgtcacccattccgaaaacgggtgtcggggtgcatacaaagcacgagtttttgccaccgaaaccatttcttcgtttttcgtaacgaacatgccaatccattactttaggtccaaaactcatgtttggggtggtttcgcgcaatttcgttgtcgcacgtcacccattccgaaaacgggtgttggggtgcatacaaagcacgagtttttgccaccggaaccatttcttcgttttcccaacgaacatgcccaatccactactttaggtccaaaactcatgtttggtgtggtttcacgcaatttcgttgccgcactttacccattccaaaaacgggtatcggggtgcatacaagcacgagtttttgccaccggaaccatttcttcgtttttcacaacgaacatacccattccactactttaggtccaaaactcatgtgttggggtggttttgcgcaatttcgttgccgcacgtcacccattccgacaacgggtgtcggggtgcatacaatggttgagttttcgccaccg

SEQ ID NO: 309 - DNA, 1913 bp, Zea mays
  source: /note="Zea mays BAC clone full insert sequence contig bacb.pk243.l15.fis67"
gaacatgcccaatccactactttaggtccaaaactcattttggggtggtttcgcgcaatttcgttgtcgtacgtcacccattcccaaaacgggtgtcggggtacatacaaagcacgagtttttgccaccggaaccacttcttcgtttttcgcaacatacatgcccagtccactactttaggtccaaaactcatgtttggggtggtttcgcgctatatcgttgccgcacgtcacccatttcaaaaacgggtgtcggggtgcatacaaagcatgagtttttgccaccggaaccatttcttcattttccgcaacgaacaagctcaatccactactttaggtccaaaactcatgtttggggtggtttcgcgcaatttcgttgccgcacgtcacccattccgaaaagggaaatttggatccataccattaaaagatcaccactttggatccataccattgctatctcacttacatgtgggtccacatgagtcaatgacatgtggggtccatggtatatatctaaagtttggatcttttaatggtatagatccaattgttcctttcgaaaatgggtgttgggggtgcatacaaagcatgagttttcgccaccggaaccacttcttcgtttttcgcaacgaacatgcccaatccactactttaggtccaaaactgatgtttggggtggtttcgtgctatatcattgccgcacgtcaccaatttcgaaaacgggtgtcgtggtgcatacaaagcacgagtttttgccaccagaaccatttcttcgtttttcgcaacgaacatgcccaatccactactttaggtccaaaactcatgtttggggtggtttcgcgcaattttattgccgcacgtcacccattccgaaaacgggtgtcggggtgcatacaaagcatgagttttcgccaccggaaccatttcttcgttttcgcaacgaacatgcccaatccactactttgggtccaaaactcatgtttggtgtggtttcgcgctatttcgttgccgcacgtcacccattccgaaaacgggtgtcggggtgcatacaaagaacgagttttcgccaccggaactatttcttcgtttttcacaacgaacatgcccaatccactactttaggtccaaaactcatgtttgggctggtttcacgctatttcgttgccgcatgttacccattccgaaaacgggtgtcggggtgcatacaagcacgagtttttgccaccggaaccatttcttcatttttctcaacgaacatgcccaatccactatttaggtcaaaaactcatgtttggggtggtttcgcgcaatttcgttgccgcacgttacccattccgaaaacgggtgtcggggtgcatacaagcacgagtttttgctaccggaaccgtttcttcgttttttgcaacaaacatgcccaatccactactttaggtccaaaactcatgtttggggtggtttcgcgcaatttcgttgccgcacgtcacccattccgaaaacgggtgtcggatgcatgcaaagcatgagttttcgccaccggaaccattgcttcgtttttcgcaatgaacattcccaatcgactactttaggtccaaaaatcatgtttggggtggtttcgcgcaatttcgttgccgcacgtcacccatcccgaaaacggtagtcggggtgcattaaaagcatgagttttcgccactagaaccatttcttcgtttttcgcaacgaacatgcccaatccacaactttgggtccaaaactcatgtttggggtggtttcgcgcaatttcgttgccgcacgtcacccattccgaaaacgggtgtcggggtgcatacaaagcacgagttttcgccactagaaccatttcttcgtttttctcaacgaacatgcccaatccactactttaggtccaaaactcag

SEQ ID NO: 310 - DNA, 3265 bp, Zea mays
  source: /note="Zea mays BAC clone full insert sequence contig bacb.pk243.l15.fis68"
accattttttcgctttttgcaacgaacatgcccaatccactactttaggttcaaaactcatgtttggggtggtttcgcgcaatttcgttgccgcacgtcacccattacaaaaatgggtgtcgggcggagtgcatacaaagcacgagtttttgccaccagaaccaattcttcgtttttcacaacaaacatgcccaatccactactttaggtccaaaactcatgtttggggtggtttcgcgcaattttgttgccgcacgttacccattccgacaacgggtgtcggggtgcatacaagcacgagttttcgccaccggaaccatttcttcgtttttcgcaacgaacatgcccaatcctctactttaggtccaaaactcatgtttggggtggtttcgcgtaattttgttgccacacgtcactcattccgaaaacgggtgtcagggtgcatacaaagcacaagtttttttccaccggaaccatttctttgtttttttgcaacgaacatgcccaatccactactctaggtccaaaactcatgtttggggtgatttcgcgcaatttcgttgccgcacgtcacccattccgaaaacgggtgtcgagatgcatacaaagcatgagttatcgccaccggaaccatttcttcgtttttcgcgacgaacatgcccaatccaatactttgggtcccaaactcatgtttggtgtggtttcgcgcaatttcgttgtcgtacgtcacccattcccaaaacgggtatcggggtgcatacaaagcacgacttttgccaccggaaccagttcttcgttttcgcaacgaacatgcccaatccactactttaggtccaaaactcatgtttggtgtggtttcgcgctatttcgttgccgcacgtcacccattccgaaaacgggtgtcggggtgcatacaaagcacgagtttttgccactagaactatttcttcatttttcgcaacgaacatgtccaatccactactttaggtccaaaactcatgtttgggttggtttcgtgcaatttcgttgccgcacgtcacccattctgaaaacgggtgtcgaggtgcatacaaagcacgagtttttaccaccggaaccaattcttcgtttttcgcaacgaatatgcccaatccactaatttagatccaaaactcaagtttggggtggtttcgcgctatatcgttgacgcacgtcacccattccgaaaacgggtgtcggggtgcatacttagcaccagtttttgccaccggaactatttctttgtttttcgcaacggacatgcccaatccactactttaggtccaaaactcatgtttggggtggtttcacgcaatttcgttgctgcacgtcacccattccgaaaacgggtgtcggggtgcatacaaagcacgagtttttgccaccggaaccatttcttcgtttttcgcaacgaactggcccaatccactactttaggtccaaaactcatgtttgggttggtttcgcgcaatttcgttgccgcacgtcacccattccaaaaacgggtgtcagggtggatacaaagcacgagttttcgccaccgaaaccatttttcgtttttcgcaacgacataaccaatccactactttaggtccaaaactcatgtttggggtggttttgtgcaattttgttgccggacatcaccaattccaaaaacgggtgtcagggtgcatacaagcacgagtttttgccaccggaaccatttttcgttttgtgcaacgaacatgcccaatccaatacttttggtccaaaactcatgtttggggtggtttcgcgcaatttcattgccgcacgtcacccattacaaaaacgggtgtcgggcggggtgcatacgaaggaagagtttttaccaccggaaccaatttttcgtttttcgcaacgaacatgcccaatccactaatttaggtccaaaactcatgtttggtgtggtttggcgctatatcgttgccgcacgtcacccattccgaaaacgggtgtcggggtgcatatttagcatgagtttttgccaccggaaccatttctttgtttttcgtaacgaacatttccaatccactactttaggtccaaaactcatgtttggggtggtttcacgcaatttcgttgccgcacgtcacccattccgaaaacgggtgtcggggtgcatacaaaccacgagttttcgccaacggaaccatttcttcgtttttctcaacgaacatgcccaatcgactactttaggtccaaaactcatgtttggggtggttttgcgcaatttcgttgccgcacgtcatgatagagctagagtgcccgatctttcggtcagtggagataattccgatttggtggaagtagaccctcacgatccgactacgatgagcgaacccgaagcgccaatgcaatcgctgaaccaactcccaatggttaccgaccttgttgatgcgagatcggcctgatcatgaagatcgtttcctgtgcgcaatcgaagaacgaacaagaaaaagatgcgagcaatcttaatatcactcgaggtggagttctgaatcacagaggacagcacgtatttgtgcgtgttctagggcagctaaagctagatgtaaaacaaaactcaagttctaaataaaacaggactctgactaagtagaggagaggcgtgaacagtagggtcggcgctacagtaccgcggttactgttcacgacttccctaggcgccccatccgggccttcctgttgggccatcttctaatcttctgggccttcgttctttaacagcatgatgtagttcaattctcttgcacgggcccgagtcactggcccaggtggaaggggtggcgcctggacaggggaagatggtgcctgggctggagaaagtgctgctggtgtagatgtactcgtgttggtgttgatgtcctcatcatcctccccttcttgaactgaagtcgtcctcgatggcaactcctcatcttctcccacatacggtttcaaatctgcaacattaaaactagtggaaacaccaaactccgcaggcaggtcaaggatataagcagtagcattaatcttggttagtatcttaaaaggaccagcagcacgaggcatcaatttagaacgacgcaaagtaggaaaacgatcctttctcaaatgaaccaaaccatatcaccaggttcaaaagtaactagtttccggcctttactaccagtaatatgatatttagcattagcagcagcaatgttttgttgagtttgttcaacatgtgcaacacatctatgtgtgg

SEQ ID NO: 311 - DNA, 2182 bp, Zea mays
  VARIATION (82)..(82): /replace="c" or "g" or "t"
  misc_feature (82): /note="Nucleotide given in the sequence has no preference with respect to those in the annotation for said position"
  source: /note="Zea mays BAC clone full insert sequence contig bacb.pk243.l15.fis69"
gaccacaaaatatgaaacccagctattgtttttccatcatcacaagaagaattgattgctgacacttgtgatagtgaagatatgtggtataatgattcacatgtactaaggcaacaactagtaaatgaacatgttacatctgttattgaaccaaacattttggctaaaaaggaacatgtaatttgtattgcaaacgaaactgaagaaataaatttgctctcttctttaaatacttggggctatattgagtttgatgatctttttgagctcggtaatttggaaaatattttatttgctagatcaactataccttgtccttctcatgttatattttacattgctggcaagtacaacaacataggacaatttcttgtgcgtagaatttctattttatctagatatgttgtttcttcactttgtgcaaataagatattggtatgttctcaagaagaaaagaatctcttgtttccatgtactttagtagaagtttcaggtttatatttgaaagacattgataaaagcttagtcatcaacatcaatcatgatgcaaaaccgaggacggtttgctatcaagaaggggagaatgatgagaacataaaccgcacagatacggccatgttaatggctcctgctacaaagacattgaggaacaaagaagttgattggggaccaagtaatgatatttccaacatttccaaccaagcaagcacatcatcaaatttaaagatatacttggttgaggagcacacgctagagtcgaggacgactctattacaagaaggggaggatgatgaggacatcactgccatcaatacaaccacaccagcgacccccttcaccatttaatcatggaccagtgaaacgagtccgtgcatgtaaatttaattatcaggtgaactcgttccttgttgaagctaatcattccttaaatgaggtactaataccttgtgattactttattatgctaaggtgtttgggaggtgaaccatctagaatttgagaagtcaacaaggcaataaaagctgctccacttgatgggattttgtaactgcagcaagtgcaagttgaagatgatgtgcacccgttgggtgattgcccgatctttcgatgagagggtgtggaataactcgattgggggaggagacgacgttcacggcccgactacagccttccaaagacgctgcgccttagcaaccgatacaccacctcctatggctgtcacgatcttgtggagcgtgacaccctggccactagggcactcgtcctgcaagcaatcgaagaactagcaagaacaagtagaacaagtactgaattaccagatctaaatgtaggtttaaagatcaaactacaatatggtggggttccgaagacaagaagacgggcggctgaactagcacgcgcgcttgcaagcaagtagcgagagctaaacttgatctaaacaaaacccgctgttcttggtggcggctagggggtttataaacatgggaggacgaccacaagggtattggggtcgtgctgcaaccctaggatgcgtccctaatggacctaacttgatacacgacccattgggccaaaatagggtgacgcagcaccatgggcagaaaaggcaggaaatgtctcggtaagaaaacaatgattacggcggcctcagaacagatatgactataattccggatccatatgaaagtagacttgataagctttccatgttgtgcttgaacattccaatccgagcccgcatctgaccgtggtgaccgtcacaagttggtgttcttctgcagtccgaatccagcatgttcaaatccttttccctttcggtcttctccctgattcctaagcaaaacaagagtgcacgggtctccatggtctaaatatgatggacatgaactcaagagtgtaatcacctgatggttgagttgacgagcacgagcgcgagtaatgggaccagaaattggtacttgtattggtatagatgcatcagtagtgtggatgtcttcatcagcatgttcgttgcgaaaaacaaaaaaatggttccggtggcgaaaactcatgctttctatgcaccccgacacccgttttcggaatgggtgacgtgcggcaacgaaattgcgcgaaaccacctcaaacatgagttttggacctaaagtagtggattgggcatgttcgttgcgcaaaacgaaga

SEQ ID NO: 312 - DNA, 2713 bp, Zea mays
  source: /note="Zea mays BAC clone full insert sequence contig bacb.pk243.l15.fis70"
gcaatttcgttgccgcacgtcacccattccgaaaacgggtgtcggggtgcatacaaaagttgagttttcgccaccggaaccatttcttcgtttttcccaacgaacatgcccaatccactactttaggtccaaaactcatgtttggtgtggtttcacgcaatttcgttgcagcacgttacccattccgaaaacgggtgtcggggtgcatacaagcacgagttttcgccaccggaaccatttcttcatttttcgcaacgaacatgcccaatccactactttaggtccaaaactcatgtttgggtggtttcgcgcaatttcgttgccgcacgtcacccattccgaatacgggtgtcggggtgcatacaaaacacgagtttttgccactggaaccatttcttcgtttttcgcaacgaacatgcccaatccactactttaggtccaaaactcatgtttggggtggtttcgcgcaatttcgttgtcatacgtcaccccattcccaaaactggtgtcggggtgcatacaaagctccaccggaaccatttcttcgtttttcgcaacgaacatgcccaatccactactttaggtccaaaactcatgtttggggtggtttcgcgcaatttcgttgtcatacgtcaccccattcccaaaacgggtgtcggggtgcatacaaagctccaccggaaccatttcttcgtttttcgcaacgaacatgcccaatccactactttaggtccaaaactcatgtttggggtggtttcgcgcaatttcgttgtcatacgtcaccccattcccaaaacgggtgtcggggtgcatacaaagcacgagtttttgccaccggaaccaattcttcgtttttcgcaacgaacttgccaaatccactgctttaggtccaatactcatgtttggggtggtttcgtgccacacgtcacccattccgaaaacgggtgtcggggtgcatacaaagcacgagtttttgccaccggaaccatttcttcgtttttcgcaacgaacatgccaatccattactttaggtccaaaactcatgtttggggtggtttcgcgcaatttcgttgccgcacgtcacccattccgaaaacgggtgttggggtgcatacaaagcacgagtttttgccaccggaactatttcttcatttttcccaacgaacatgcccaatccactactttaggtccaaaactcatgtttggtgtggtttcacacaatttcgttgccgcacgttacccattccgaaaacgggtatcggggtgcatacaagcacgagtttttgccaccggaaccattccttcgtttttcacaacgaacatacccattccactactttaggtccaaaactcatgtgttggggtggttttgcgcaatttcgttgccgcacgtcacccattccgaaaacgggtgtcggggtgcatacaaaggttgagttttcgccaccggaaccatttcttcgtttttcccaacgaacatgcccaatccactactttaggtccaaaactcatgtttggtgtggtttcacgcaatttcgttgccgcacgttacccattccgaaaacgggtgttggggtgcatacaagcacgagtttttgccaccggaaccatttcttcgtttttcacaacgaacatacccattccactactttaggtccaaaactaatgtgttggggtggttttgcgcaatttcgttgccgcacgtcacccattccgaaaacgggtgtcggggtgcatacaaagaacgagtttttgccaccggaaccatttctttgtttttcgcaacgaacatgcccaatccactactttaggtccagaactcatgtttggggtggtttcgcacaatttcgttgccgcacgtcacccattccgaaaacgggtttcggggtgcatacaaagcacgagttttcgccaccggaaccatttcttcatttttcgcaacgaacatgcccaatccactactttaggtccaaaactcatgtttggggtggtttcgcgtaatttcgttgccgcatgtcacccattccgaaaacgggtgtccgggtgcatacaaagcacgagttttttccaccggaaccattttttcgtttttcgcaacgaacatgtccaatcaactattctaggtccaaaactcatgtttggggtggtttcgcgcaatttcgttgccgcacgtcaccgattccgagaacgggtgtcggggtgcacatcagttttcgccaccggaaccatttcttcatttttcgcaacgaacatgcccaatccactactttaggtccaaaactcatgtttgggtggtttcgcgcaatttcgttgccgcacgtcacccattccgaatacgggtgtcggggtgcatacaaaacacgagtttttgccactggaaccatttcttcgtttttcgcaacgaacatgcccaatccactactttaggtccaaaactcatgtttggggtggtttcgcgcaatttcgttgtcatacgtcaccccattcccaaaactggtgtcggggtgcatacaaagctccaccggaaccatttcttcgtttttcgcaacgaacatgcccaatccactactttaggtccaaaactcatgtttggggtggtttcgcgcaatttcgttgtcatacgtcaccccattcccaaaacgggtgtcggggtgcatacaaagctccaccggaaccatttcttcgtttttcgcaacgaacatgcccaatccac

SEQ ID NO: 313 - DNA, 4626 bp, Zea mays
  source: /note="Zea mays BAC clone full insert sequence contig bacb.pk243.l15.fis71"
gcccgtcccccattcccgaaaacgggtgtcgggggtgcatacaaagcatgagttttttcaccggaaaccattttttcttttttcgcaacaaacatccccatccattactttaggtccaaaacacatgtttggggtggtttcgcgcaatttcgttgctgcacgtcacccattccgaaaacgggtgttggggtgcatacaaagcacgagtttttgccaccggaaccatttcttcgtttttcccaacgaacatgcccaatccacaacattaggtccaaaactcatgtttggcgtggtttcgcgcaattttgttgccgcatgttacccattccgaaaacgggtgtcggggtgcatacaagcacgagtttttgccaccggaaccatttcttcgtttttcacaacgaacatgcccattccactactttaggtccaaaagtcatgtttggggtggttttgcgcaatttcgttgccgcacgtcacccattccgaaaactggtgtcgggttgcatacaaagtttgagttttcgccaccggaaccatttcttcgtttttcgcaacgaacatgccaatccattactttaggtccaaaactcatgtttggggttggtttcgcgccacacgtcacccattccgaaaacgggtgttggggtgcatacaaagcacgagtttttgccaccggaaccatttcttcgtttttcacaacgaacatgctcattccactactttaggtccaaaagtcatgtttgggttggttttgcgcaatttcgttgccgcacgtcacccattccgaaaactggtgtcggggtaaagcttgagttttcgccaccggaaccatttcttcgtttttcgcaacgaacatgcccaatccactactttaggtccaaaactcatgtttggggtggtttcgcgcaatttcgttgccgcacgtcacccattccgaaaacgggtgtccgggtgcatacaaagcacgagttttttccaccggaaccatttcttcgtttttcgcaacaaacatacccaatccactactttaggtccaaaacacatgtttggggtggtttcgcgcaatttcgttgccgcacgtcacccattccgaaaacgggtgttggggtgcatacaaagcacgagtttttgccaacggaaccatttcttcgtttttcccaacgaacatgcccaatccacaactataggtccaaaactcatgtttggcgtggtttcgcgcaatttcgttgccgcatgttacccattccgaaaacgggtgtcggggtgcatacaagcacgagtttttgccaccggaaccatttcttcgtttttcacaacgaacatgcccattccactactttaggtccaaaactcatgtttggggtggttttgcgcaatttcgttgccgcacgtcacccattccgaaaacgggagtcgggggtgcatacaaagcatgagttttcgccaccggaaccatttcttcgtttttcgcaacgaacatgcccaatacactactttaggtccaaaactcatatttggggtggtttcacgcaatttcgttgcagcacgtcacccattccgaaaacgggtgtcgggtgcatacaaagcatgagttttcgccaccggaaccatttcttcgtttttcgcaacaaacatgcccaatccactactttaggtccaaaactcatgtttggggtggttttgtgcaatttcgttgccgcacatcaaccattccgaaaacgggagtcggtgtgcatacaaagcatgagttttcgccaccggaaccatttcttcgtttttcgcaacgaacatgcccaatccactactttgggtccaaaactcatgtttggtgcggtttcgcgtaattttgttgtcgtacgtcacccattccccaaacgtgtgtcggggtgcatacaaagcacgacttttgccaccggaaccaattcttcgtttttcgcaacgaacatgcccaatccactactttaggtccaaaacttatgtttggtgtggtttcgcactatttcgttgccgcacgtcacccattccgaaaacgggtgtcggggtgcatacaaagcacgagtttttgccaccgaaaccatttcttcgtttttcgcaacaaacatgcccaatccactactttaggtccaaaactcatgtttgggttggtttcgcgcaatttcgttgccgcacgtcacccattctgaaaacggatgtcattgtggatacaaagcacgagttttcgccaccggaaccatttcttcgtttttcgcaacgaacatgctcaatccactactataggtccaaaactcatgtttggggtggtttcgcgcaatttcgttgccgcacgtcacccattccgaaaacgggtgtcggggtgcatacaaagcacgagttttcgccaccggaaccatttcttcgtttttctcaacgaacatgcccaatccactaccttaaggcccaaaaccaaggttggggtgggtttgcgcaatttcgttgccccacgtcacccattcccaaaaccggagtccggggggcatacaaaacaagatttttcccccccagaaccattttttcttttttcccaacgaacatgcccaatcgactactttggggccaaaaatcatgtttggggtggtttcgcgcaatttcgttgccgcacgtcacccattccaaaaacggtagtcgggtgcattaaaagcatgagttttcgccaccggaaccatttcttcgtttttcgcaacgaacatgcccaatccactactttgggtccaaaactcatgtttggggtggtttcgcgcaatttcgttgccgcacgtcacccattccaaaaacgggagtcggggtgcatacaaagcacgagttttcgccaccggaaccatttcttcgtttttcgacacgaaatgcccaatccactactttgggtccaaaactcatgtttggggtggtttcgcgcaatttcgttgccgcacgttacccattccgaaaacgggtgtcgggtgcatacaaagcatgacttttcgccaccggaaccatttcttcgtttttcgcagcgaacaagtccaatccactactttaggtccaaaactcgtgtttggggtggtttcgcgcaatttcgttgccgcacgtcacccattccgaaaacgggtgtcgggtgcatacaaagcatgagtaggggcgtaaacggtacggatattatccgaccatctgaccgtccgaagaggctaattattcagttgaatagttttttcggatatccgcagaatttttggattacggattcgaattcggatagtacagttcggatatcggatacggatatgatatgactgatatccgtcggatttcggatatccggatatcttctcggataactgtccggatttcatatttcggatatccggacatctactcagatatcttaccagatttcagattttagatattcggatatccggatatcttctcggataacatgtggaatcgtcctaaatatccaagtttcaacataatcaatacttcactttatcattttcatatgtggatttgaggttatgttcttatataatgtttattgttcgtggtaacatatttgcaatttttggtcaatagtggaatattttatgaatttaaatgtattttgataattttctgtagaaaaaattataataatacacaaatagtctcaaaaaatcatgaaatttgacggaggagcaatatatgcccatatagcatcctaaaaaatgtttgagccataaaatctaaagattgccaacatttctttcaattcactttcacttgttacctgagttacatgtgatatcaccttaactatccaaattttaacataatcaatacttcactttatcattttcacatagggacttcatattatctttaatagaatgtttattggtcctggtaacttatttagaatttttggtagacactagattattttatgattttaattacattttgatgattttttgtagaaagaaattaataatacacaaattgccttagaaattcataaaatttgacggagggttaacatttgtctacataaaattctaaaaaatgtttgtgccataaagtccataagatgccagtgattcttttcattttcttacacttgttgtgtgagttacacgtgaaatcagctgaagtatctaagtgtcggcgtttcgagaccggggggggggggggtccctaagccgacgagtgaatgtcgccgcgtgccctagcccagatgggtcgacgcgaggccgagcgcgaaagggggaagtgaggtggccggagaccggcgtgagagaggtggaaatcccgcggccttcgtgttcgtcccgcgcccaggtcgggtgcgcttgcagtagggggttacaagcgtccacgcgggagagggagcgagcggcctcacgcgagcgcctgtctcgtcctcgtccccgcgcggccaaccctgatgtgcacccgttgggtgattgcccgatctttcgatgagagggtgtggaataactcgattgggggaggagacgacgttcacggcccgactacagccttccaaagacgctgtgccttagcaaccgatacaccacctcctatggctgtcacgatcttgtggagcgtgacaccctggccactagggcactc

SEQ ID NO: 314 - DNA, 2513 bp, Zea mays
  source: /note="Zea mays BAC clone full insert sequence contig bacb.pk243.l15.fis72"
ttattcgcttgatgtgcgaggctcaaaagggtgctgggataaggtctaacctaaatttttatgtggttttatggactgtaggagaaaaaaactcgagataaactcaccgatcaacctggaaatctgataccacttgatagagctggagtgcccgatctttcggtgagtggagataattccgatttggtggaagtagaacctcacgatccgactacgacgagcgaacccgaagcgccaatgcaatcgctgaaccaactcccaatggttaccgaccttgctgatgcgagatcggcctgatcacgaagatcatttcctgtgcgcaatcgaagaacgaacaagaaaaagatgcgagcaatcttaatatcactcgaggtggagttttgaatcacagaggacaacacgtatttgtgcgtgttctagggcagctaaagctagatgtaaaacaaaactcaagttctaaataaaacaggactctgactaaatagaggagaggcgtgaacagtagggccggcgctacagtaccgcggttactgttcacgccttccctaggcaccccatccgggccttcctgttgggccatcttctaatcttctgggccttcgttctttaacagcatgatgtagttcaattctcttgcacgggcccgagtcactggcccaggtggaaggggtggcgcctggactagggaagatggtgcctgggctggagaaggtgctgctggtgtagatgtacttgtgttggtgttgatgtcctcatcacgtcacccattctgaaaacgggtgtcggtgtgcatacaaagcatgagttttcgccaccggaaccatttctttgtttttcgcaacgaacatgcccaatccactgcttttggtccaaaactcatgtttgaggtggtttcactcaatttcgtagcctcacgtcacccattccgaaaacgggtgtcagggtgcacataaagcacgagttctttccacctgaaccatttcttcgttattcgcaacgttcgtgcccaatccactactttaggtccaaaactcatgtttggggtggtttcgcgcaatttcgttgtcgcacgtcacccattccgaaaacgggtgtcggggtgcatataaagcatgagtttttgccaccggaactatttctttgtttttcgcaacgaacatgctcaatccactactttaggtccaaaactcatgtttggtgtggtttcgcgcaatttcgttgtcgtacgtgacccattcccaaaacgggtgtcggggtgcatacaaagcacgacttttgccaccggaaccaattcttcgtttttcgcaacgaacatgcccaatccactactttatgtccaaaactcatgtttggtgtggtttcgcgctatttcattgccgcacgtcacccattccgaaaacgggtgtcgtggtgcatacaaagcacgagtttttgccaccggaaccatttcttcgtttttcgcaacgaacatgcccaatccactactttaggtccacaactcatgtttgggttggtttcgcgcaatttcattgccacacgtcacccattctgaaaacgggtgtcgggtgcattcaaagcatgagttttcgccaccggaaccatttcttcgtttttcgcaatgaacatgcccaatccactactttaggtccaaaactcatgtttggggtggttttgtgcaatttcgttgccgcacattaccaattccaaaaatgggtgtcagggtgcatacaagcacgagtttttgccaccggaaccatttcttcgttttgcgcagcgaacatgctcaatccaatactttaggtccaaaactcatgtttggggtggtttcacgcaatttcattgccgcacgtcacccattacaaaaacgggtgtcgggcggggtgcatacaaagcacgagtttttgccaccggaaccaattcttcatttttcgcacgaacatgcccaatccaccaatttaggtccaaaactcatgtttggggtggtttcgcgctatatcgttgccgcacatcacccattccgaaaacgggtgtcggggtgcacacttagcacgtgtttttgccaccggaaccatttctttgtttttcgcaacgaacatgcccaatccaccactttagatccaaaactcatgtttggggtggtttcgcgcaattttgttgccgcatgtcacccattccgaaacgggtgttggggtgcatacaaagcacgagttttcgccaccgaaaccatttcttcgtttttctcaatgaacatgcccaatccactactttaggtccaaaactcatgttggggttggttttgcgcaatttcgttgccgcacgtcacccattctgaaaacaggtgtcggtgtgcatacaaagcatgagttttcgccaccggaaccatttcttcgtttttcgcaacgaaaatgcccaatccactgctttagatccaaaactcatgtttggggtggtttcgcgcaatttcgttgcctcacgtcacccattccgaaaacgggtgtcggggtgcacataaa

SEQ ID NO: 315 - DNA, 2716 bp, Zea mays
  source: /note="Zea mays BAC clone full insert sequence contig bacb.pk243.l15.fis73"
gaccaaatcgcaggagcatttaatgcaaaggtggcctgacacctttatcctgatgcgcgccccccagccgacagagccgaagtgaccaccatcactttgccgctccactgaccggcctgacagaaagacagcgccgcctgcactgctccgactgcggtgccacttgacagagtgaggctgacaggcagtcagacccggccgcaggcaccataggaagctccgcttcacccgacccagggctcggactcgagctaagccccggaagacgacgaactccgctccgcccgacccagggctcggactcgggctaagccccggaagacggcgaactccgctccgcccgacccagggctcggacacgggctaagccccgaaagatggcgaactccgctccgcccgacccagggctcggactcgggctaagccccagaagacggcgaactccactccgcccgacccagggctcggactcgggctaagcctcggaagacggcgaactccgctccgcccgacccagggctcggactcgggctcagccccagaagacgacgaactccgcttcgcccgatcccagggctcggactcgggcacagccccagaagacgacgaactccgcttcgcccgaccctagggctcggactcgggctcagcccccagaagatgacgaactccgcttcgcccgaccccaaggcccggactcagccctggcctcagccgacggtctccgcctcgcccgaccaagggctcggactcgacctcggccacggaaggcagactcgacctcggcttcggaggagcttccacatcgcccaacctagggcgcagaccggccacgtcaacaggaggcaccatcatcgccctaccccgagttgactcgggccacgggaaacaagaccggcgtcccatctggctcgctccaccagataggcaatgatggcgccccgcacactcggtgacgacggcggctctcagcccccttacggaagcaaaaggacgtcagcagggactcaacagctccgacagctgtccctccgccaggctccagcactcctccgacggccacgacatcacaccagctgggtgccaaaatctctccggctgccacgacggcatgtactcagggcgctagctctcctccgctagacgcgtagcactctgctacaccccccattgtacacctggatcctctccttacgcctataaaaggaaggactagggccctcttagagagggtttgatgaagacatccacactactgatacatctatgccaatacaagtaccaatttctggtcccattacttctggtcccattactcgcgctcgtgctcgtcaactcaaccatcaggtgattacactcttgaatgcatgtccatcatatttagaccatggagacccgtgcactcttgttttgcttaggaaccagggagaagaccgaaagggaaaatgatttgaacatgctggattcggactgcagaaaaacatcaacttgtgacggtcaccacggtcacatgcgggctcggattggaatgttcaagcacaacatggaaagcctatcaagtctactttcatatggatccggaattatagtcatatctgttctgaggccgccataatcattgtttccttaccgagacatttcctgccttttctgcccatggtgctgcgtgaccctattttggcccaatgggtcgtgtatcaagttgggtccattagtgacgcatcctagggttgcagcacgaccccaatacccttgtggtcgtcctcccatgtttataaaccccctagccgccaccaagaacagcgggtttttttagatcaagtttagctctcgctacttgcttgtaagcgcgcgtgctggttcagccgcccgtcttcttgtcttcggaaccccaccatattggagtttgattttgaaacctacatttagatctggtaattcagtacttgttctacttgttcttgctagttcttcgatttcttgcaggacgagtgccctagtggctagggtgtcacgctccacaagatcgtgacagccataggaggtggtgtatcggttgctaaggcgcagcgtctttggaaggctgtagtcgggccgtgaacgtcgtctcctcccccaatcgagttattccacaccctctcatcgaaagatcgggcaatcacccaacgggtgcacatcagttggtaatcagagcaaggtttatcggtgagagatttacttttcttcgctgttttcttatctcctatagtccagaaaaagccaaaaaaatagtagtttagttttaccgcaatcctataaaccattgaccatttactagtactacttagctagggcttgttgagtttttggttgcatcggttgtgtcgagttgctggtcttagtttatttttttagagttttgagttctaccacgttttggtcaccacgagatccaccatcaccataaacttcgtttttgccaccacggatacatctcatgtccgatttggaagtttaaatacaatctggaaagcttatcttatcttatttccaacggatctgaccttgtctcaaaattcattctgagcgctccgcaatcatcgtagagatttctggactttctatattaacaagatttgttaaatctgatttaaagcggctgttagcaatatccttattgtttgggttgtcatagtgaaaaaaagggtttaggcccctgcaaaaaaaagaagaagaa

SEQ ID NO: 316 - DNA, 3633 bp, Zea mays
  source: /note="Zea mays BAC clone full insert sequence contig bacb.pk243.l15.fis74"
gaaattgcacgaaaccaccccaaacatgagtcttggacctaaagtagtggattgggcatgttcgttgcgaaaagcgaagaaatggttctggtggcgaaaactcatgctttgtatgcaccccgacacccgttttcggaatggttgacgtgcggcaacaaaattgcgcgaaaccaccccaaacatgagttttggacctaaagtagtggattgggcatgttcgttgcgcaaaacgaagaaatggttccggtggcaaaaactcgtgcttgtatgcaccctgacacccttttttggaattggtgacgtgcggcaacgaaattgcacgaaaccaccccaatcatgagttttggacctaaatagtggattgggcatgttcgttgcgaaaaacgaagaaatggttccggtggcgaaactcgtgctttgtatgcacccggacacccgttttcggaatgggtgacgtgcggcaacgaaattgcgcgaaaccaccccaaacacgagttttggacctaaagtagtggattggacttgttcgctgcgaaaaacgaagaaatggttccggtggcgaaaagtcatgctttgtatgcacccgacacccgttttcggaatgggtaacgtgcggcaacgaaattgcgcgaaaccaccccaaacatgagttttggacctaaagtagtgtattgggcatgttcgttgagaaaaacgaagaaatggttccagtggcgaaaactcgtgctttgtatgcaccccgacaccggttttcggaatgggtgacgtgcggcaacgaaattgcgcgaaaccaccccaaacatgagttttggacccaaagtagtggattgggcatgttcgttgcgaaaaacgaagaaatggttccggtggcgaaaactcatgctttgtatgcacccccgactcccgttttcggaatgggtgacgtgcggcaacgaaattgcgcaaaaccaccccaaacatgagttttggacctaaagtagtggattgggcatgttcgttgagaaaaacgaagaaatggttccggtggcgaaaactcatgctttctatgcaccccgacacccgttttcggaatgggtgacgtgcggcaacgaaattgcgcgaaaccacctcaaacatgagttttggacctaaagtagtggattgggcatgttcgttgcgaaaaacaaagaaatggttccggtggcgaaaactcgtgctttgtatccaccctgatacccctttttggaattgggtgacgtgcggcaacaaaattgcgcgaaaccaccccaaacatgagttttggacctaaagtagtggattggacttgttcgctgcgaaaaacgaagaaatggttccggtggcgaaaagtcatgctttgtatgcacccgacacccgttttcggaatgggtaacgtgcggcaacgaaattgcgcgaaaccaccccaaacatgagttttggacctaaagtagtggattgggcatgttcgttgagaaaaacgaagaaatggttccaatggcgaaaactcgtgctttgtatacaccccgacaccagctttcggaatgggtgacgtgcggcaacgaaattgcgcgaaaccaccccaaacataagttttggacctaaagtagtggattgggcatgttcgttgcgaaaaacgaagaaatggtttcggtggcaaaaactcgtgctttgtatgcaccccgacacccgttttcggaatgggtgacgtgcggcaacgaaatagtgcgaaaccacaccaaacatgagttttggacctaaagtagtggattgggcatgttcgttgcgaaaaacgaagaaatggtttcggtggcgaaaactcatgctttgtatgcatccgacacccgttttcggaattggtgacgtgcggcaacgaaattgcgcgaaaccaccccaaacatgagttttggacctaaagtagtggattgggcatgttcgttgcgaaaaacgaagaaatggttccgggtgcgaaaactcttgctttgtatgcaccccgacacccgttttcggaatgggtaacgtgcggcaacgaaattgcgcgaaaccaccccaaacatgagttttggacctaaagtagtggattgggcatgttcgttgagaaaaacgaagaaatggttccggtggcgaaaactcgtgctgtgtatgcaccccaacacccgttttcggaatgggtaacgtgcggcaacgaaattgcgcgaaaccaccccaaacatgatttttggacctaaagtagtggattgggcatgttcgttgcgaaaaacgaagaaatggttccggtggcaaaaactcgtgctttgtatgcaccccgacacccgttttcggaatgggtaacgtgcggcaacaaaattacgtgaaaccacctcaaacatgagttttggtcctaaaatagtggattgggcatgttcgttgagaaaaacgaagaaatggttccggtggcgaaaactcatgctgtgtatgcaccccgacacccgttttcggaatgggtgacgtgcggcaacgaaattgcgcgaaaccaccccaaacatgatttttggacctaaagtagtggattgggcatgttcgttgcgaaaaacgaagaaatggttccggtggcaaaaactcgtgctttgtatgcaccccgacacccgttttcagaatgggtgacgggcggcaacgatattgcgcgaaagcaccccaaacatgagttttggacctaaagtagtgtattgagcatgttcgttgagaaaaacgaagaaatggttccagtggcgaaaactcgtgctttgtatgcaccccgacaccggttttcggaatgggtgacgtgcggcaacgaaattgcgcgaaaccaccccaaacatgagttttggacccaaagtagtggattgggcatgttcgttgcgaaaaacgaagaaatggttccggtggcgaaaactcatgcttttaatgcacccgactaccgttttcggaatgggtgacgtgcggcaacgaaattgcgcgaaaccaccccaaacatgatttttggacctaaagtagtcgattgggcatgttcgttgcgaaaaatgaagaaatggtttcggtggcgaaaactcatgctttgtatgcatccgacacccgttttcggaatgggtgacgtgcggcaacgaaattgcgcgaaaccaccccaaacatgagttttggacctaaagtagtggattgagcatgttcgttgagaaaaacgaagaaatggttccggtggcgaaaactcgtgctttgtatccaccttgacacccattttcggaatgggtgatgtgcggcaacgaaattgtgtgaaaccaacccaaacatgagttgtggacctaaagtagtggattgggcatgttcattgcgaaaaacgaagaaatggttccggtggcaaaaactcgtgctttgtatgcaccccgacaccctttttcggaatgggtgacgtgcggcgacaaaatagcgcgaaaccacaccaaacatgagttttggacataaagtagtggattaggcatgttcgtagcgaaaaatgaagaattggttccggtggcaaaagtcgtgctttgtatgcaccccgacacccgttttggaaatgggtgacgtacgacaacgaaattgcgcgaaaccacaccaaacatgagttttggacctaaagtagtggat

SEQ ID NO: 317 - DNA, 3812 bp, Zea mays
  source: /note="Zea mays BAC clone full insert sequence contig bacb.pk243.l15.fis75"
gtgcggcaacgaaattgcgcgaaaccaccccaaacatgagttttggacctaaagtaatggattggcatgttcgttgcgaaaaacgaagaaatggttccggtggcaaaaactcgtgctttgtatgcaccccgacacccgttttcggaatgggtgacgtgtggcacgaaaccaccccaaacatgactattggacctaaagcagtggatttgccaagttcgttgcgaaaaacgaagaattggttccggtggcaaaaactcgtgctttgtatgcaccccgacacccgttttgggaatggggtgacgtatgacaacgaaattgcgcgaaaccaccccaaacatgagttttggacctaaagtagtggattgggcatgttcgttgcgaaaaacgaagaattggttccggtggcaaaagtcgtgctttgtatgcacctcgacaccccgttttgggaatgggtgacgtacgacaacgaaattgcgcgaaaccacaccaaatatgagttttggacccaaagtagtggattgggcatgttcgttgtgaaaaacgaagaaatggttccggtggcgaaaactcatgctttgtatgcacccccactaccgttttcggaatgggtgacgtgcggcaacgaaattgcgcgaaaccaccccaaacatgagttttggacctaaagtagtggattgggcatgtttgttgcgaaaaacgaagaaatggttccggtggcgaaaactcatgatttgtatgcacccgacacccgttttcggaatgggtgacgtgcggcatcgaaattgcgcgaaaccaccccaaacatgagttttggacctaaagtagtggattaggcttgttcgctgcgaaaaacgaagaaatggttccggtggcgaaaactcatgctttgtatgcacccgacacccgttttcggaatgggtaacgtgcggcaacgaaattgcgcgaaaccaccccaaacatgagttttggacctaaagtagtggattgggcatgttcgttgagaaaaacgaagaaatggttctagtggcgaaaactcgtgctttgtatgcaccccgacaccggctttcggaatgggtgacgtgcggcaacgaaattgcgcgaaaccaccccaaacatgaattttggacccaaagttgtggattgggcatgttcgttgcgaaaaacgaagaaatggttctagtggcgaaaactcatgcttttaatgcacccccgacaccgttttcggaatgggtgacgtgcggcaacgaaattgcgcgaaacccacccccaaacatgagttttggacctaaagtagtcgattgggaatgttcattgcgaaaaacgaagcaatggttccggtggcgaaaactcatgctttgcatgcatccgacacccgttttcggaatgggtgacgtgcggcaacgaaatcgcgcgaaaccaccccaaacatgagttttggacctaaagtagtggattgggcatgttcgttgagaaaaacgaagaaatggttctggtggcgaaaactcgtgctttgtatgcaccccgacaccggctttcggaatgggtgacgtgcggcaacgaaattgcgtgaaaccaccccaaacatgagttttggacccaaagttgtggattgggcatgttcgttgcgaaaaacgaagaaatggttctggtggcgaaaactcatgcttttaatgcaccccgactaccgttttcggaatgggtgacgtgcggcaacgaaattgcgcgaaaccaccccaaacatgatttttggacctaaagtagtcgattgggaatgttcattgcgaaaaacgaagcaatggttccggtggcgaaaactcatgctttgcatgcatccgacacccgttttcggaattggtgacgtgcggcaacgaaattgcgcgaaaccaccccaaacatgagttttggacctaaagtagtggattgggcatgtttgttgcgaaaaacgaagaaacggttccggtagcaaaaactcgtgcttgtatgcaccccgacacccgttttcggaatgggtaacgtgcggcaacgaaattgcgcgaaaccacccccaaacatgagtttttgacctaaataatggaatgggcatgttcgttgagaaaaatgaaaaaatgggtcccgtgggaaaaactcgtgcttgtatgcaccccgacaccccctttcggaatgggtaacatgcggcaacgaaatagcgtgaaaccagcccaaacatgagttttggacctaaagtagtggattgggcatgctcgttgtgaaaaacgaagaaatagttccggtggcgaaaactcgttctttgtatgcaccccgacacccgttttcggaatgggtgacgtgcggcaacgaaataacgcgaaaccacaccaaacatgagttttggacccaaagtagtggattgggcatgttcgttgcgaaaacgaagaaatggttccggtggcgaaaactcatgctttgtatgcacccgacacccgttttcggaatgggtgacgtgcggcaataaaattgcgcgaaaccaccccaaacatgagttttggacctaaagtagtggattgggcatgttcattgcgaaaaacgaagaaatggttccggtggcgaaaactcgtgctttgtatccaccctgacacccgttttcggaatgggttccgtgcggcaacgaaattgcgcgaaaccaccccaaacatgagttttggacctaaagtagtggattgggcatgttcgttgcaaaaacgaagaaatggttccggtggcaaaaactcgtgctttgtatgcaccccgacccccgttttcggaatgggtgacgtgcggcaacgaaatagcgcggaaccaccccaaacatgagttttggacctaaagaagtggattgggcatgtttgttgcaaaaaaacgaagaattggttccggtggcaaaagtcgtgctttgtatgcacctcgacacccgttttgggaatgggtgacgtacgacaacgaaattgcgcgaaaacacaccaaatatgagttttggacccaaagtagtggattgggcatgttcgttgtgaaaaacgaagaaatggttccggtggcgaaaactcatgctttgtatgcacccccactaccgttttcggaatgggtgacgtgcggcaacgaaattgcgcgaaaccaccccaaacatgagttttggacataaagtagtggattgggcatgtttgttgcgaaaaacgaagaaatggttccggtggcgaaaactcatgatttgtatgcacccgacacccgttttcggaatgggtgacgtgcggcatcgaaattgcgcgaaaccaccccaaacatgagttttggacctaaagtagtggattaggcttgttcgctgcgaaaaacgaagaaatggttccggtggcgaaaactcatgctttgtatgcacccgacacccgttttcggaatgggtaacgtgcggcaacgaaattgcgcgaaaccaccccaaacatgagttttggacctaaagtagtggattgggcatgttcgttgagaaaaacgaagaaatggttctggtggcgaaaactcgtgctttgtatgcaccccgacaccggctttcggaatgggtgacgtgcggcaacgaaattgcgcgaaaccaccccaaacatgagttttggacccaaagttgtggattgggcatgttcgttgcgaaaaacgaagaaatggttctggtggcgaaaactcatgcttttaatgcaccccgactaccgttttcggaatgggtgacgtgcggcaacgaaattgcgcgaaaccaccccaaacacgagtttttggacctaaagtagtcgattgggaatgttcattgcgaaaaacga

SEQ ID NO: 318 - DNA, 4016 bp, Zea mays
  source: /note="Zea mays BAC clone full insert sequence contig bacb.pk243.l15.fis76"
tcttatccgttcttaccaagccacagtggtgaactgcaaccaacaggtggaaccggtgaaagattggatgagcgattgcctggagaaacagaaaccttctcgtcgtagaaatatgtggagttttgggtaggctgcactcaactcaaggattagcacaatcaaaaaataatgcaaagttgaattatagtgcaaaacacgaaactatattactggccacaagtgcaaaggacggatggaactagcagaatggcagtaccgtaactattgtactagcgaggccaaaaaggcactagtatgaatcacaggtgattttgtttttcttttttgtatgatttttttaatatttttctcagcacaaggagcaacaaaataggagctacacgaagtttcacctaaaaaagagttcagatgtggtctacagaaaattaggaagttctccgaaaagcgtgcgagatctttgacgatttttttctttattttcctgaattttttgacaattttatcgaaaccaaacaggccgtaggcgagtttggccggcctcagaatggtgtcaacaagcttctgtaaaaatttcagattttttgaacaaccgagtgaaaagttatgcccggtttaaggaaggtatgtaaaaatcaggaagttgtatcctttctccttcgttttttttgtttctgtttttttacgtaaccgaaggagaaaaacaaggaagcggcgttgactcggtttgtttttttctgttttttttacgtaaccgaaggagaaaaataaggaagcggcgttgactcggtttgtggcgtgatcaaacggaatatggtggcggcgcgctagggtttgaatggtggaataacacaatgcaaccagcaacaaatgacgtgaaagcacacaaattcaacaatgcagattattgaaagaaagtgagaggctcaaaagggttctgggataaggtctaacctaaatttttatgtggttttatggactgtaggagaaaaaaactcgagataaactcaccgatcaacctggaaatctgataccacttgatagagctggagtgcccgatctttcggtgagtggagataattccgatttggtggaagtagaacctcacgatccgactacgacgagcgaacccgaagcgccaatgcaatcgctgaacaaactcccaatggttaccgaccttgctgatgcgagatcggcctgatcacgaagatcatttcctgtgcgcaatcgaagaacgaacaagaaaaagatgcgagcaatcttaatatcactcgaggtggagttctgaatcacagaggacaacacgtatttgtgcgtgttctagggcagctaaagctagatgtaaaacaaaactcaagttctaaataaaacaggactctgactaaatagaggagaggcgtgaacagtagggccggcgctacagtaccgcggttactgttcacgccttccctaggcaccccatccgggccttcctgttgggccatcttctaatcttctgggccttcgttctttaacagcatgatgtagttcaattctcttgcacgggcccgagtcactggcccaggtggaaggggtggcgcctggactagggaagatggtgcctgggctggagaaggtgctgctggtgtagatgtactcgtgttggtgttgatgtcctcatcacgtcacccattctgaaaacgggtgtcggtgtgcatacaaagcatgagttttcgccaccgtaaccatttctttgtttttcgcaacgaacatgcccaatccactgcttttggtccaaaactcatgtttgaggtggtttcactcaatttcgtagcctcacgtcacccattccgaaaacgggtgtcagggtgcacataaagcacgagttctttccacctgaaccatttcttcgttattcgcaacgttcatgcccaatccactactttaggtccaaaactcatgtttggggtggtttcgcgcaatttcgttgccgcacgtcacccattccgaaaacgggtgtcggggtgcatataaagcatgagtttttgccaccggaactatttctttgtttttcgcaacgaacatgcccaatccactactttaggtccaaaactcatgtttggtgtggtttcgcgcaatttcgttgtcgtacgtgacccattcccaaaacgggtgtcggggtgcatacaaagcacgacttttgccaccggaaccaattcttcgtttttcgcaacgaacatgcccaatccactactttatgtccaaaactcatgtttggtgtggtttcgcgctatttcattgccgcacgtcacccattccgaaaacgggtgtcgtggtgcatacaaagcacgagtttttgccaccggaaccatttcttcgtttttcgcaacgaacatgcccaatccactgctttaggtccacaactcatgtttgggttggtttcgcgcaatttcgttgccacacgtcacccattctgaaaacgggtgtcgggtgcattcaaagcatgagttttcgccaccggaaccatttcttcgtttttcgcaatgaacatgcccaatccactactttaggtccaaaactcatgtttggggtgattttgtgcaatttcgttgccgcacattaccaattccaaaaacgggtgttggggtgcatacaagcacgagtttttgccaccggaaccatttcttcgttttgcgcaacgaacatgcccaatccactaatttaggtccaaaactcatgtttggggtggtttcgcgctatatcgttgccgcacgtcacctattccgaaaacgggtgtcgggcggggtgcatacaaagcatgagtttttgccacctgaaccaattcttcgtttttcgcaatgaacatgcccaatccactaatttaggtccaaaactcatgtttggggtggtttcgcgctatatcgttgccgcacgtcacccattccgaaaatgggtgtcggggtgcatacttagcacgagtttttgccaccggaaccatttctttgtttttcgcaacaaacatgcccaatccactactttaggtccaaatctcatgtttggggtggtttcgcgcaatttcgttgcagcacgtcacccattccgaaaacgggtgttggggtgcatacaaagcacgagttttcgccaccgaaaccatttcttcgtttttctcaatgaacatgcccaatccattactttaggtccaaaactcatgtttgggttggttttgcgcaatttcgttgccgcacgccacccattctgaaaacgggtgtcggtgtgcatacaaagcatgagttttcgccactggaaccatttcttcgtttttcgcaacgaacatgcccaatccactgctttaggtccaaaactcatgtttggggtggtttcgcgcaatttcgttgcctcacgtcacccattccgaaaacgggtgtcggggtgcacataaagcacgagttctttccaccagaaccatttcttcgtttttctcaacgaacatgcccaatccactactttaggtccaaaactcatgtttggggtggtttcgcgcaatttcgttgcggcacgtcacctattccaaaaaacgggtgtcgaggtgcacacaaagcatgacttttcgccactggaaccatttcttcatttttcgcaacgaacattcctaatccactactttagatccaaaactcatgtttggcgtggtttcgcgcaatttcgttgccgcacgtcacccattcccaaaacgggtgtctgggtgaatacaaagcacaacttttgccaccggaacccattcttcgtttttcgcaacgaacatgcccaatccactactttatgtccaaaactcatgtttgatgtggtttcgctctatttcgttgccgctcgtcacccattccgaaaacgggtgtccgggtgcatacaaagcacgagtttcgccaccggaaccatttcttcgtttttcgcaacgaacatgctcaatccactatttaggtccaaaactcatgattggggtggtttcgtgcaatttcgttgccgcacgtcaccaattccaaaaa

SEQ ID NO: 319 - DNA, 3382 bp, Zea mays
  source: /note="Zea mays BAC clone full insert sequence contig bacb.pk243.l15.fis77"
atctaaacgtggaatagggtgtcgataacgtatcgtgatattattaatagccctacaatcaacacacatacgccatgttccatcttttttaggcactaaaataaccggaacagcacacggactaagagactcacgcacgtaacctttgtcgagtagttcttgcacttgtcgctgaatttcttttgtttcctctggatttgtcctatatggcgcacgattcggcaaagatgcaccaggaataagatcaatttggtgctcaatccctcgtataggtggcagcccctctggtatctcacttggaaatacatcagaatactcctgcaaaatgttagtaataacaggaggcaaagaatgctgcatatcttgaattgaaatcaaagcatccttgcataccaaggcgtaggcaacagtagtggaagcaaataattcattaacatcagtttttgttgcaagcaagcaatgtcctttcaattttatcccatctttgttattaccaacaactttaatattcttgttgttctcagttttagctttggtagctttagcaacatcatcacgcacaatagcctcaggggacatgggaagcaaaataattttcttatcatggtgtatgagagaatattgatttgatctaccatgatgcatacaatctgaatcaaattgccatggtctacctagcagaatattacaagcatccataggcacaacatcacagtcaacaacatcacgatatgaaccaatagcaaaattaattcgtaccaacttggttaccttgaccttaccactattgttgagccattgaatgtgatatggatgtgggtgcggtttggtcgtaagtgcaagcttctccaccatgtcgctgctagccaagttgttgcagctacctccatcaatgatcaaacgacatgaacgctccttaatgacacactttgtttgaaacaatgtatgtcgctgattctgctctgccttctccatttgtgcactaagcacacgctgtacaatgaggctctcataatgctctgcatcatctgcaccaatctgttcttcgggtggttccttagtgcctgcatcatcagccgcaagcaaagcaagtgtagcttcatccaaatcactagcagaagaatacccaccatcgtcttttaccaccaaaacacgctgattaggacaatcacgctgcacgtgtccatagcccttgcatcgataacacagaacatctcttgttctacccgtggaggctactgaagaggcactacctgctggtttctgggcagatttggttgctgaatttgtggaagatgcacgtggtttgtcgccggaggaaggcgggggtgctggtcgacttggcgagggagttggtgctagtgtacgaccggtcatggacgtagtcgtgcgctgttgccatggtgtagattttcctgcagaaacattagaccttgcactagcacgtcgtccctgcacttccctttcagctttgcaagcaagatgaaacaatcgggttacattagcataatctttataagcaaggatgtcctgaatttccctatttaacccgcccaaaaatctagccatagcagattcctcaccctcctctatgttacaacgcagcattcccatttgtaattcctgataatattcttctacacttttagtaccctgtctcaattgttgcaacttgtttaacatatcacgtgcataataagaaggaacaaatctagcccgcatgacccgtttcaacgcatcccaagtttgtggcatgttattaggattcttcttaccatgttctatccaccaaacagaagcaaattcagtaaactcactagtagcagctctaacccgcgcattctcaggaaattcatggcatgcaaacttttgatcaaccgcaatctcccaagtaatgtaagcatcagggtcatatttaccatcaaaaggaggtattttaaatttaaccttactaaaagcatcatcattaccatgtacctcacgtcggcgaaaaccacccatacctctacggttagtacgtagtcgccggcgattaggtgcttcttggtcatcttgttcagtatcagcaacatagtcatcccagttaccttcggcgccctcatcacgcccaccattgatattagcatgcatctcatcaaaccgcctcaagagtgcgacaaggctcttgtcaatatgagcaactgtcatttccacatttgcaagtttggtgttcgtgtcgatctgtgtggcctccaattgccccatcttttcattcgtcacctgcatgtcattatcaagaccttccgtgtgcgtcttcactagccttacaaagtgttgtatgatacccttggtgcgaggagagtgtggcatattacgagaagcatcatcaacctccaatcctgccatggttagacgaacagaggcaacaagaaaaaaaaacgtgaaggaataaaaactctacaactattaggatgtagctactgcaaggcgctcactctcaacctgccacacaagctcttaccaattcttaccttgcacaacaggaggggtcagcaaccaacaagtctgcaaccgtggaataagtgtatcggtgccgcagcaacacgacctgtcaaactgtagtcgaaatatgtagagttgtaggtgggctgaagcaaggaatacactagtaccacgttagttacaaaagcaagctgaataatcgttcaacggtggtactgtgctggtcctaggctaaaccaggctagagacgtgagcctaggcacaaaggtagtcactgaaaaagaacaactagcacagcacaaagagaaacaacagatttagagattcagcccccttcttcttcttttcctttttttttcttttctattctttttttttcttcttcttctgttttttttttgcaggggcctaaaccctttttttttcactatgacaacccaaacaataaagatattgctaacaacccctttaaatcagatttaacaaatcttgttaatataggaagtccagaaatctctacgatgattgcggagcgctcagaacgaattttgagataaggtcagatccgttggaaagaagataagataagctttccagattgtatttaaacttccaaatcggatatgatatgtatccgtggtggcaaaaacgaaccagagatgtttttggtggtggtggatttcgtggtgaccaaaatgtggtagaactcaaaactctaaaggaataaactaagaccagcaactcgacacaaccgatgcaaccaaaaactcaacaagccctaactaagtagtactagttaatgctcaatggtttataggattgcggtaaaactaatctactattttttggctttttctggactataggagataagaaaacagcgaagaaaagtaatctctca

SEQ ID NO: 320 - DNA, 3894 bp, Zea mays
  VARIATION (3810)..(3811): /replace="c" or "g" or "t"
  misc_feature (3810)..(3811): /note="Nucleotides given in the sequence have no preference with respect to those in the annotations for said positions"
  source: /note="Zea mays BAC clone full insert sequence contig bacb.pk243.l15.fis78"
caaactgccttttgttttgttgcacttacaaattttatctaccaaaatttagaactggtttctctctctctctctctctctcttgttgcacgtgtcttttttttgttttactgattagtgcggcttttttatgcactcgccttttgctttctcttctttttggttgaattgcagcaagaggtctaaagtggtgattgaaacaaggtggcgcgaactccaaactctagcggtaagaaaactttagaccagcaactcgacccaaatgcagcaattgtgaattcaacaagtcgaaaactaagtagtaaagcaaaggctcaaactgtttttaggtgaatttctgatctaaatatatatttgggcaaaagtggactgtaggtaaataaaacaaggaagattgagttctctcaccgagcaacctgaaatttgataccacttgataaacccaacgggtagaagggtgcccgatctttcgatgagaggtgatggaggtggaaaacttgttggagaacgacgttggctgcccgactaccacaaccaagatggtgtggcgccttgagcgacaggtacaccgtctcctgataactacgatttggggtggaggtcgacgttgtgctatccgactacaacaaccacaagggtgctgcaccttagcgatagttacaccagctcctattgttgccgctcttgccgtgccaagaacagccttgaacctgcaagcaatcgagaacaagcaagaacaagataaaaagcagacgctcacggatctgatagagttggggttctgtttcaagtatccgggtggtctagccgacacacatgtttacaaggaagtagcaaaggcgtttttacatcaaacaaaaaccccagttctttggtggctgctagttgcttaaatagaggaatagaaaggagttctaatggagaacaaaactctctcggcagtttctagacgcctcgtttggtttctgtcattgattcttgatgcacctgaaagtagacgaagagagctttccaacaattgcttatttgctttaaacaaccttgggagttgaaagatatgctccatttaatttagtgcttgcagttacgaaatcacttgtgctggtggagtcatgaagttgtctcggccgttcctggacgccttggatgcgttctctccttgactcttgatctactagaaagtagacaaagagacctttccaacaagtgcttatttgcattaaacaaccttgggagctgaaagatatgccctcttaaacttgcacttgttgtagtttcgaaatcccctcaagtggagcagcttttattgccttgttgccttctcaaattctagatggttcacctcccaaacaccttagcataataaagtaatcataaggtattagtacctcatttaaggaatgattagcttcaacaacaaggaacgagttcacctgataattaaatttacgtgcacggactcatttcactggtccatgattaaatggtgaagggggtcgctggtgtggtgtattgatggcagtgatgttctcatcactgataggtatgaaagtcttgttgtgcagcgtgttcttagtacacaggtcgctttgcccgagaagaatcagcgacacactctattccatacaaagggtgttgtgcaggagcggtcaattcacatcattatcgacagcggcagttgcaacaatttggcgagtaccattctggtcgaaaagttgtcgttacccactcgtaagcatccaaacccatatcacattcaatggcttaatgatggtggtaaaataaaaatcacacgttccgtacgtgttcctttctcaagggtgcttattctgattttgttgattgtgatgttattcccatggaagcatgctctttgttacttggttgaccttggcaatatgatactgatagcctgcatcatggtcgttcgaatcattattctttcatttttaagggtcagaaaataattatacatccaatgacacctgaacaaattattaaagatgatcttgtccgagctgctataactgctaaacaacttgatccatcgccctctgttccttctgaaatcaagttgaaggctcctgttttacttgctacacgtgctgattttgatgatctacacggtgctcattttccatgctatgcacttgtatgctctagtgtcctcatttcacttgatgatgcaccatctttggctattccccctatggttgctaaccttttgcaggagtacgctgatgtctttcccaaagacttaccaccgggtctcccaccgcatcgtggcattgagcaccagatcgacctcatccccggcgcacagcttccgaaccgcccaccgtaccgtacaaatccggatgagatgaaggagattctgcaccaggtacaggcgttgcttgacaagggatacattcgtgagtctcttagcccttcctctgttcctgtgttacttgttcccaagaaagatgggtcatggcgtatgtttgtagactgtcgtgctattaataacatcactattcgttatcgatatcctataccacgccttgatgatatgctagatgagcttagtgttgccattattttcactaagattgatttgtgtagtggttaccaccagattagaatgaaactgggtgatgaatggaaaacggcttttaaaacgaaatttggtttatatgaatggttggttatgccgtttggattgactaatgctcccagcacttttatgcgagtgatgaatgaagatctaaggcccttcataggattgtttgtggttgtttattttgatgatatccttatttacagcaaatctaagaaagagcatttggaacatttaagtgctgtttttgatgcattgcgtgctgcccagttatttgctaacatggaaaaatgcttcttttgcacacgacgtgtctcgtttcttggttatgttgttactccacagggcattgaggtggatagcagcaagattgctgccattcggaagtggcctacaccgataacggtcacacaaattcggagctttcttagacttgccggtttctactacagatttgttcgtgattttagctccattgcagcgcctctacatgagcttacaaagaaagatgtgccgtttgcttggagtgattcgcaggaggtagcgttcagcactttgaaagataagttaacctaagctccccctattgcaattgcctgattttaataaagtgttcgagcttgaatgcgatgctagcgatattgggctaggtgctgttttgttacaagaaggaaaaccagtgcttattttagtgaaaaattaagcggtgctagtctaaaatattctacttatgataaggagctttacgctttagtgcacactttgcatacatggcagcactatctttggcatcgtgagttcataattcattctgatcatgaggctttaaaacatattcgtacctgatgtagctgaggtgcccgatctttcggcgagtagagataattccgatttggcggaagatgacccttgcgatccgactacgacgagcaagcccgaggcgccaatgcaatcgctgaaccaactccctgtggttaccgaccttgctgatgcgagatcggcctgatcacgaagatcgtttcctgtgcgcaatcgaagaacgaacaagaacaagatgcgagcaatctaatctattactcgagggtggagttctgaatacacgaagacagcgcagatttgcgcgtgttcgagagtagctaaggctaacgtaaaacaaaactcaggaaataaaggaggcgcagctcctgtataaatagagagggggcgcagcaactaggggcggccaaccctaggtcgtccattatgggccgcaattgggctggtcgtctattcttccgggccttcgttctttaaca

SEQ ID NO: 321 - DNA, 4868 bp, Zea mays
  source: /note="Zea mays BAC clone full insert sequence contig bacb.pk243.l15.fis79"
ttccgaaaatgggtgtcggggtgcatactaagcccgagtttttgccaccggaaccatttcttttttttttgcaacgaacatgcccaatccaatactttaggtccaaatctcatgtttggggtggtttcgcgcaatttcgttgcagcacgtcacccattccgaaaacgggtgttggggtgcatacaaagcacgagttttcgccaccgaaaccatttcttcgtttttctcaatgaacatgcccaatccattactttaggtccaaaactcatgtttgggttggttttgcgcaatttcgttgccgcacgccacccattctgaaaacgggtgtcggtgtgcatacaaagcatgagttttcgccactggaaccatttcttcgtttttcgcaacgaacatgcccaatccactgctttaggtccaaaactcatgtttggggtggtttcgcgcaatttcgttgcctcacgtcacccattccgaaaacgggtgtcggggtgcacataaagcacgagttctttccaccagaaccatttcttcgtttttctcaacgaacatgcccaatccactactttaggtccaaaactcatgtttggggtggtttcgcgcaatttcgttgcggcacgtcacctattccaaaaaacgggtgtcgaggtgcatacaaagcatgacttttcgccaccggaaccatttcttcatttttcgcaacgaacattcctaatccactactttagatccaaaactcatgtttggcgtggtttcgcgcaatttcgttgccgcacgtcacccattcccaaaacgggtgtctgggtgaatacaaagcacaacttttgccaccggaacccattcttcgtttttcgcaacgaacatgcccaatccactactttatgtccaaaactcatgtttgatgtggtttcgctctatttcgttgccgctcgtcacccattccgaaaacgggtgtccgggtgcatacaaagcacgagtttcgccaccggaaccatttcttcgtttttcgcaacgaacatgcccaatccactatttaggtccaaaactcatgattggggtggtttcgtgcaatttcgttgccgcacgtcaccaattccaaaaaagggtgtcagggtgcatacaagcacgagtttttgccaccggaaccatttcttcgttttgcgcaacgaacatgcccaatccactactttaggtccaaaactcatgtttggggtggtttcgcgcaattttgttgccgcacgtcaaccattccgaaaacgggtgtcggggtgcatacaaagcatgagttttcgccaccagaaccatttcttcgcttttcgcaacgaacatgcccaatccactacattaggtccaagactcatgtttggggtggtttcgcgcaatttcgttgccgcacatcacccattacaaaaacgggtgtcgggcggggtgcatacaaagcacgagtttttgccactggaaccatttcttagtttttcgcaacgaacatgcccaatccacaactttaggtccaacactcatgtttggggtggtttcgcgcaatttcgttgccgcacgtcgcccattccgaaaacgggtgtcgggtgcatacaaagcatgagttttcgccaccgtaaccatttcttcgttttttgcaaagaacatgcccaatccactactttaggtccaaaactcattttggggtggtttcgcgcaatttcgttgtcgtacgtcacccattcccaaaacaattgtcggggtacatacaaagcacgagtttttgccaccggaaccacttcttcgtttttcgcaacatacatgcccagtccactactttaggtccaaaactcatgtttggggtggtttcgcgctatatcgttgccgcacgtcacccatttcaaaaacgggtgtcggggtgcatacaaagcatgagtttttgccaccggaaccatttcttcattttccgcaacgaacaagctcaatccactactttaggtccaaaactcatgtttggggtggtttcgcgcaatttcgttgccgcacgtcacccattccgaaaagggaaatttggatccataccattaaaagatcaccactttggatccataccattgctatctcacttacatgtgggtccacatgagtcaatgacatgtggggtccatggtgtatatctaaagtttggatcttttaatggtatagatccaattgttccttccgaaaatgggtgttgggggtgcatacaaagcatgagttttcgccatcggaaccacttcttcgtttttcgcaacgaacatgcccaatccactactttaggtccaaaactgatgtttggggtggtttcgtgctatatcattgccgcacgtcaccaatttcgaaaacgggtgtcgtggtgcatacaaagcacgagtttttgccaccagaaccatttcttcgtttttcgcaacgaacatgcccaatccactactttaggtccaaaactcatgtttggggtggtttcgcgcaattttattgccgcacgtcacccattccgaaaacgggtgtcggggtgcatacaaagcatgagttttcgccaccggaaccatttcttcgttttcgcaacgaacatgcccaattcactactttgggtccaaaactcatgtttggtgtggtttcgcgttatttcgttgccgcatgttacccattccgaaaacgggtgtcggggtgcatacaagcacgagtttttgccaccggaaccattttttcatttttctcaacgaacatgcccaatccactatttaggtccaaaactcatgtttggggtggtttcgcgcaatttcgttgccgcacgttacccattccgaaaacgggtgtcggggtgcatacaagcacgagtttttgctaccggaaccgtttcttcgtttttcgcaacaaacatgcccaatccactactttaggtccaaaactcatgtttggggtggtttcgcgcaatttcgttgccgcacgtcacccattccgaaaacgggtgtcggatgcatgcaaagcatgagttttcgccaccggaaccatttctttgtttttcgcaatgaacattcccaattgactactttaggtccaaaaatcatgtttggggtggtttcgcgcaatttcgttgccgcacgtcacccatcccgaaaacggtattcggggtgcattaaaagcatgagttttcgccaccggaaccacttcttcgtttttcgcaacgaccatgcccaatccacaactttgggtccaaaactcatgtttggggtggtttcgcgcaatttcgttgccgcacgtcacccattccgaaaaccggtgtcggggtgcacaaagcacgagttttcgccaccagaaccatttcttcgtttttctcaacgaacatgcccaatccactactttaggtccaaaactcatgtttggggtggtttcgcgcaatttcgttgccgcacgttacccaatccgaaaacaggtgtcgggtgcatacaaagcatgagttttcgccaccggaaccatttcttcgtttttcgcagcaaacaagcctaatccactactttaggtccaaaactcatgtttggggtggtttcccgcaatttcgatgccgcacgtcacccattccaaaaacgggtgtcgggtgcatacaaatcatgagttttcgccaccggaaccatttcttcgtttttcgcaacaaacatgcccaatccactacgtaggtccaaaactcatgtttggggtgctttcgcgcaatttcgttgccgcacgtcacccattccgaaaacggtagtgggggtgcatacaaagcatgagttttcgccaccggaaccatttcttcgtttttcacaacgaacatgcccaatccactactttgggtccaaaactcatgtttggtgggttttcgcgaaatttcgttgtcgtacgtcacccattcccaaaacgggtgtcgggggtgcatacaaagcacgacttttgccaccggaaccaattcttcgtttttcgcaacgaacatgcccaatccacttctttaggtccaaaactcctgtttggggtggttccgcgctatttcgttgccgcacgtcacccattccgaaaacgggggtcgaggtgcatacaaagcacgagtttttgccaccggaaccatttcttcgttttttgcaacgaacatgcccaatccactactttaggtccaaaactcatgtttgggttggtttcgcgcaatttcgttgccgcacggaactagagatggcaatgggtacccgctactcgaaacccggtgggtttttgctctattagggtatgggtttgggtcaatttctctacccatgggtttgttaatgggttcaaatggaaacccaacgggtatgtgggcatgggtttgttcttccactacccatacccgcaaacccatgggtttttaaaacccgccttaaaatcaacattccttataaatatgtctcataatattattaattgaatatgttctaattgaaataaacttcatgtcacaaattttaggctaaaattagttatcacttgttccttttatgctagcttattaatgtattgattgtcatttacatgatgaaatattttttatgttgatgttagtgggtatgggaaacccgttgggtacccgaaacccgcatgggtatgggtttgggcaaaatttaatacccgtcatgggtatgggttttttagcgagcgtattttttcttcgcgggtatgggtttgggcaagtaatacccaacgggtttttacccattgccatctctacacggaacccattccgaaaacgggtgtcagggtggatacaaagcacgagttttcgccaccggaaccatttcttcgtttttcgcaatgaacatgcccaatccactactttaggtccaaaactcatg

SEQ ID NO: 322 - DNA, 5349 bp, Zea mays
  source: /note="Zea mays BAC clone full insert sequence contig bacb.pk243.l15.fis80"
tggtggtaaaataaaggtaacacgttcggtacgtgtccccttttcgctgggttcttattctgattatgctgattgcgatgttattcctatggaagcatgctctttgttattaggtcgaccttggcaatatgatactgatagtttacatcatggtcgttcaaatcattattctttcatgtttaaaggccagaaaataattatacatccaatgacccctgaccaaattttgaaagatgatcttactagggctgctaaaactgcacaacaagtcaaatcgacatcagccgcacctgttaaatctgaaatcaagttgcactctcctgttttacttgctacacgtgctgattttgatgatctccatgaagctcatatgccctgttatgcacttgtatgctcgcgaatgcttgttccgcttgatgatgcaccgtctttggatataccccctgctgttgttaaccttttgcaggagtatgctgatgtttatcctacggacttaccaccgggtcttcctcccctccgtggcattgagcatcagatcgatctcatccccggcgcttctcttccgaaccgcgccccgtaccgtactaatccagatgagacgaaggagatccagcgccaggtgcagacactgcttgataagggttacattcgtgagtctcttagcccttgctcggttcctgttttactcgtcccaaagaaagatgggtcatggcgtatgtgcgtagattgtcgtgctattaataacatcacagttcgttatcgatatcctattccacgccttgatgatatgctagatgagcttagtggtgccgttattttctctaaggttgatttgcgtagcggttaccatcagattagaatgaaactcggtgatgaatggaaaacggcttttaaaacgaaatttggtttatatgaatggttggttatgccatttggattgactaatgctcccagcacctttatgcgtttaatgaacgaagttctacgggccttcataggtttgtttgttgttgtttatttcgatgatatccttatttacagcaagtctatagaggagcatttagaacatttgcgtgctgtttttgacgctttgcgtgctgctcgcttgtttggtaacatggaaaagtgcacattttgcacgcaacgtgtctcgtttcttggttatgtggttactccgcagggcattgaggtggatagcagcaagattgctgccattcgggagtggcctacaccgacgacggtcacacaaattcggagctttcttggacttgccggtttctaccgcagatttgttcgtgattttagctccattgcagcgcctctacatgagcttacaaagaaagatgtgccatttgcttggagtaattcgcaggaggtagcgttcagcactttgaaagataagttaacccaagctcccctattgcaattgcctgattttaataaagtgtttgagcttgaatgcgatgctagcggtattgggctaggtgctgttttgttacaagaaggaaaaccagttgcttattttagtgaaaaattaagcggtgctagtctgaaatattctacttatgataaggagctttacgctttagtgcgcactttgcatacatggcagcactatctttggcatcgtgagtttataatccattctgatcatgaggctttaaaacatattcgtacccaaacaaatctgaaccgtcgtcatgctaaatgggtagaattcattgagtcctttccttacattattaaacacaagaacgggaaggataatgttattgctgatgctttgtctcgtcgctataccatgctgtcacagttagattttaaaatctttggtttggacactgtgaaggatcaatatgttgacgatgctgattttaaagatgctttcggccattgtattaatgggaaaccatggggcaaatttcacatacaggatgggttcctgtttcgcgctaacaagctgtgtgttccagctagctcggttcgtcttttgttgttacaggaagcgcatggaggcggtctcatggggcattttggcgtctacaagacacatgaggtgttggctgcccacttcttttggcctcggatgcgcgctgatgtggagcgccttgttgcacgctgcactacttgtcagaaagctaagtcacggttgaacaaccatggtttgtatatgcctttgcctgtcccttcttctccttggcttgatatctctatggactttgttttgggcttgcctagaactaagaaggggagggatagtatttttgtggttgttgatagattctctaaaatggctcactttataccttgtcataaaactgatgatgctagcattgttgctgaattgttctttagagaaattattcgtttacatggtattccaaaaacaatagtctctgatcgcgatgctaagtttctaagccatttttggagatctctttggaataaattgggaactaaattgttgtttagcactacttgtcaccctcagactgatggacaaactgaggtagtaaatagaactttatctaccatgcttagggctgttttagacaagaatttgagacgttgggaggattgcttgcctcatgttgaatttgcttacaatcatgccacgcattcttctacaaagatgtgccctttccagattgtttatggttacattcctagggcacctattgatttgatttcacttaatgctgcgaacgccccacatgtagatgcttctgcacatgttgaacaaatgattaccatacatgaacaaacgaaacagaacattgctgctactaatacaaaaaatcaggttgctggtagtaaaggaagaaaacatgttacttttgaacctggtgatatggtttggttgcatttgagaaaggatcgttttcctactttgcgccgttctaaattgatgcctcgtgctgctggtccttttaagatactaaccaagattaatgataatgcttataccctcgacctacctgcggagtttggtgtttccactagttttaatgttgcagatttgaaaccgtatgcgggagaagatgaggagttgccgtcgaggacgacttcagttcaaaaaggggaggatgatgcggacatcaacaccaacacgagcacatctacaccagcagcaccttctccagcccaggcgccaccccttccacctgggccagtgactcgggcccgtgcaagagaattgaactacatcatgttgttaaagaacgaaggcccggaagaatagacgaccagcccaattgcggcccataatggacgacctagggttggccgcccctaggggctgcgccccctctctatttatacaggagctgcgcctcctttatttcctgagttttgttttacgttagccttagctactctcgaacacgcgcaaatctgcgctgtcttcgtgtattcagaactccaccctcgagtaatagattagattgctcgcatcttgttcttgttcgttcttcgattgcgcacaggaaacgatcttcgtgatcaggccgatctcgcatcagcaaggtcggtaaccacagggagttggttcagcgattgcattggcgcctcgggcttgctcgtcgtagtcggatcgcaagggtcatcttccgacaaatcggaattatctctactcgccgaaagatcgggcaccttagcttcatcagaacatgtccaatccactactttgggtccaaaactcatgtttggtgtggtttcgcgtaatttcgttgtcgtacgtcacccattccctaaacgggtgtaggggtgcaaacaaagcacgacttttgccaccggaaccaattcttcgtttttcgcaacaaacatgcccaatccactactttaggtctaaaactcatgtttggtgtggtttcgcgctatttcattgccgcacatcacccattccgaaaacgggtgtcggggtgcatacaaagcacgagtttttgccaccggaaccatttcttcgtttttcgcaacgaacatgcccaatccactactttaggtccaaaacacatgtttgggttggtttcgcgcaatttcgttgccgcacgtcacccattccgaaaacgggtgttagggtggatacaaagcacgagttttcgccacaggaaccatttcttcgtttttcgcaacgaacatgcccaatccactacttcaggtcccaaactcatgtttggggtggtttcgtgcatattggttgtcgcacgtcaccaattccgaaaacgggtgtcagggtgcattaaaagcatgagttttcgccaccggaaccatttcttcgtttttggcaacgaacatgcccaatccactactttgggtccaaaactcatgtttggggtggtttcgcgcaatttcgttgccgcacgtcacccattccgaaaaccggtgtcggggtgcataaaaagcacgagttttcgccattggaaccatttcttcgtttttctcaacgaacatgcccaatccactactttaggtccaaaactcatgtttgggggtggtttcgcgcaatttcgttgtcgcacgtcacccattccgaaaacgggtgtcgggtgcatacaaagcatgagttttcgccactggaaccatttcttcatttttcgcaacgaacatgcccaatccactacattaggtccaaaactcatgtttggggtggtttcgggcaatttcattgtcgtacatccctcattcccaaaacggctgtcggggtgcatacaaagcacgagtttttgccaccggaaccaattcttcgtttttcgcaacgaactttaccaatccactactttaggtccaaaactcatgtttggggtggtttcgcgctatatcgttgccgcacgtcacccattccgaaaacgggtgtcggggtgcatacaaagcatgagtttttgccaccggaaccatttcttcgtttttcgcaacgaacatgcccattccagtactttaggtccaaaactcatgtttggggtggtttcgcgcaatttctttgccgcacatcacccattccgaaaacgggtgtcggggtgcatacaaagcatgagttttcgccaccggaaccatttcttcgtttttcgcaacgaacatgcccaatccactactttaggtccaaaactcatgtttgtggtggtttcgcgcaatttcgttgccgcacgtcacccattccgaaaacgggtgtcggggtgcatacaaagcacgagtttttgccaccggaaccatttcttcgtttttcgcaacgaacatgcccaatccactactttaggtccaaaactcgtgtttggggtggtttcgcgcaatttcgttgtcgcacgtcacccattccgaaaacgggtgtcgggtgcatacaaagcatgagttttcgcc

SEQ ID NO: 323 - DNA, 5826 bp, Zea mays
  source: /note="Zea mays BAC clone full insert sequence contig bacb.pk243.l15.fis81"
ccgcagggcattgaggtggatagcagcaagattgctgccattcgggagtggcctacaccgacgacggtcacacatattcggagctttcttggacttgccggtttctaccgcagatttgttcgtgattttagctctattgcagcgcctctacatgagcttacaaagaaagatgtatcgtttgcttggagtgattcgcaggaggtagcgttcagcactttgaaagataagttaacccaagctcccctcttgcaattgcctgattttaataaagtttttgagcttgaatgcgatgctagtggtattgggctaggtgctgttttgttacaagaaggaaaaccagttgcttattttagtgaaatattaagcggtgctagtctgaaatattctacttatgataaggagctttacgctttagtgcgcactttgcatacctggcagcactatctttggcatcgtgagttcataattcattctgatcatgaggctttaaaacatattcgtacccaaacaaatctgaaccgtcgtcatgctaaatgggtcgaattcattgagtcctttccttacattattaaacacaagaacgggaaggacaatgttattgctgatgctttgtctcgtcgctataccatgctgtcacaattagattttaaaatatttggtttggacactgtgaaggatcaatatgttgacgatgctgattttaaagatgctttcggccattgtattaatgggataccatggggcaaatttcacatacaggatgggttcctgtttcgcgctaacaagctgtgtattccagctagctcggttcgtcttttgttgttacaggaagcgcatggaggcggtctcatggggcattttggcgtctacaagacgcatgaggtgttggctgcccacttcttttggcttcggatgcgcgctgatgttgagcgccttgttaaacgctgcactacttgtcagaaagctaagtcacggttgaacaaccatggtttgtatatgcctttgcctgtcccttcttctccttggcttgatatttctatggactttgttttgggcttgcctagaactaagaaggggagggatagtattttcgtggttgttgatagattctctaaaatggctcactttataccttgtcataaaactgatgatgctagcattgttgctgaattgttctttagagaaattattcgtttacatggtattccaaaaacaatagtctctgatcgcgatgctaagtttctaagccatttttggagatctctttggaataaattgggaactaaattgttgtttagcactacttgtcaccctcagactgatggacaaactgaggtagtaaatagaactttatctaccatgcttagggctgttttagacaagaatttgagacgttgggaggattgtttgcctcatgttgaatttgcttacaatcatgccacacattcttctacaaagatgtgccctttcgagattgtttatggttacatccctagggcacctattgatttgatttcacttaatgctacgaacgccccacatgtagatgctgctgcacatgttgaacaaatgattaccatacatgaacaaacgaaacagaacattgctgctactaatgcaaaaaatcaggttgctggtagtaaaggaagaaaacttgttacttttgagccaggtgatatggtttggttgcacttgagaaaggatcggtttcctactttgcgccgttctaaattaatgcctcgtgctgctggtccttttaaggtgctaacaaagattaatgataatgcttatatccttgacctgcctgcggaatttggtgtttccactagttttaatgttgcagatttgaaaccatatatggccgaggatgaggagttgccgtcgaggacgacttcacttcaagaaggggaggatgatgaggacatcactatgagtacgactacaccagcagcacctcaacatcaagcgccacttccttcattagctgggccaatcactcgggcccgtgccagagatcttaacttcgtcattgtactaaggaatgagggcccagaagaatagacgaccagcccaactgcggcccatagtggacgacctagggttggccgcccctaggggctgcgccccctctctatttaaacgggagctgcgcctcctttgttcttcgagttttgttttacattagctttagctactctcgaacacgcgcaaatctgcgctgtcttcgtgtattcagaactccaccctcgagtaatagattagattgctcgcatctttttcttgttcgttcttcgattgcgcacaggaaacgatcttcgtgatcaggccgatctcgcatcagcaaggtcggtaaccacagggagttggttcagcgattgcattggcgcctcgggcttgctcgtcgtagtcggatcgcaagggtcaacttccgccaaatcggaattatctttactcgccgaaagatcgggcacctcagctacatcacaaggctcttgtcaatatgagcaactgtcatttccacatttgcaagtttggtgtttgtgtcgatctgtgtggcctccaattgccccatcttttcattcgtcacctgcatgtcattatcaagaccttccgtgtgcgtcttcaccatccttacaaagtgttgtatgatacccttggtgcgaggagagtgtggcatattacgggaagcatcatcaacctccaatcctgccatggttagacgaacagaggcaacaagaaaaaaaacgtgaaggaataaaaactctacaactattaggatgtagctactgcaaggcgctcactctcaacctgtcacacaagctcttaccaattcttaccttgcacaacaggaggggtcagcaaccaacaagtctgcaaccgtggaataagtgtatcggtgccgcaacaacacgacctgtcaaactgtagtcgaaatatgtagagttgtaggtgggctgaagcaaggaatacactagtaccacgtttgttacaaaagcaagctgaataatcgttcaacggtggtactgtgctggtcctaggctaaaccatgctagagacgtgagcctaggcataaaggtagtcactgaaaaagaacaactagcacagcacaaagagaaacaacagatttagagattcagcccccttctttcttcttcttttccttttttttcttttcttttttcttcttcttttttttgcaggggcctaaaccctttttttcactatgacaacccaaacaataaggatattgctaacagcccctttaaatcagatttaacaaatcttgttaatatagaaagtccagaaatctctacgatgattgcggagcgctcagaatgaattttgagacaaggtcagatccgttggaaataagataagataagctttccagattgtatttaaacttccaaatcggacatgagatgtatccgtggtggcaaaaacgaagtttatggtgatggtggatctcgtggtgaccaaaacgtggtagaactcaaaactctaaaaaaataaactaagaccagcaactcgacacaaccgatgcaaccaaaaactcaacaagccctagctaagtagtactagtaaatggtcaatggtttataggattgcggtaaaactaatctactatttttttggctttttctggactataggagataagaaaacagcgaagaaaagtaaatctctcaccgataaaccttgctctgattaccaactgatgtgcacccgttgggtgattgcccgatctttcgatgagagggtgtggaataactcgattgggggaggagacgacgttcacggcccgactacagccttccaaagacgctgcgccttagcaaccgatacaccacctcctatggctgtcacgatcttgtggagcgtgacaccctggccactagggcactcgtcctgcaagaaatcgaagaactagcaagaacaagtagaacaagtactgaattaccagatctaaatgtaggtttcaaaatcaaactccaatatggtggggttccaaagacaagaagacgggcggctgaaccagcacgcgcgcttacaagcaagtagcgagagctaaacttgatctaaaaaaacccgctgttcttggtggcggctagggggtttataaacatgggaggacgaccacaagggtattggggtcgtgctgcaaccctaggatgcgtcactaatggacccaacttgatacacgacccattgggccaaaatagggtcacgcagcaccatgggcagaaaaggcaggaaatgtctcggtaaggaaacaatgattatggcggcctcagaacagatatgactataattccggatccatatgaaagtagacttgataggctttccatgttgtgcttgaacattccaatccgagcccgcatgtgaccgtggtgaccgtcacaagttgatgttcttctgcagtccgaatccagcatgttcaaatcattttccctttcggtcttctccctggttcctaagcaaaacaagagtgcacgggtctccatggtctaaatatgatggacatgcattcaagagtgtaatcacctgatggttgagttgacgagcacgagcgcgagtaatgggaccagaagtaatgggaccagaaattggtacttgtattggcatagatgtatcagtagtgtagatgtcttcatcaaaccctctctaagagggccctagtccttccttttataggcgtaaggagaggatccaggtgtacaatggggggtgtagcagagtgctacgcgtctagcggaggagagctagcgccctgagtacatgtcgtcgtggcagccggagagattttggcacccagctggtgtgatgtcgtggccgtcggaggagtgctggagcctggcggagggacagctgtcggagctgttgagtccctgctgacgtccttttgcttccgtaagggggctgagagccgccgtcgtcaccgagtgtgcggggcgccatcattgcctatctggtggagcgagccagatgggacgccggtcttgtttcccgtggcccgagtcaactcggggtagggcgatgatggtgcctcctgttgacgtggccggtctgcgccctaggttgggcgatgtggaagctcctccgaagccgaggtcgagtctgccttccgtggccgaggtcgagtccgagcccttggtcgggcgaggcggagaccgtcggctgaggccagggctgagtccgggccttggggtcgggcgaagcggagttcgtcatcttctgggggctgagcccgagtccgagccctagggtcgggcgaagcggagtttgtcgtcttctggggctgtgcccgagtccgagccctgggatcgggcgaagcggagttcgtcgtcttctgggctgagcccgagtccgagccctgggtcgggcggagcggagttcgccgtcttccggggcttagcccgagtccgagccctgggtcgggcggagtggagttcgccgtcttccggggcttagcccgagtccgagccctgggtcgggcggagcggagttcgccatcttccggggcttagcccgtgtccgagccctgggtcgggcggagcggagttcgccgtcttccggggcttagcccgagtccgagccctgggtcgggcggagcggagttcgtcgtcttccggggcttagctcgagtccgagccctgggtcgggcgaagcggagcttcctatggtgtctgcggccgggcctgactgcctgtcagcctcactctgtcaagtggcaccgcagtcggagcggtgcaggcggcgctgtctttctgtcaggccggtcagtggagcggcgaagtgatggtggtcacttcggctctgtcg

SEQ ID NO: 324 - DNA, 789 bp, Zea mays
  VARIATION (2)..(110): /replace="c" or "g" or "t"
  misc_feature (2)..(110): /note="Nucleotides given in the sequence have no preference with respect to those in the annotations for said positions"
  VARIATION (566)..(566): /replace="c" or "g" or "t"
  misc_feature (566): /note="Nucleotide given in the sequence has no preference with respect to those in the annotation for said position"
  source: /note="Zea mays BAC clone full insert sequence contig bacm.pk147.d02.fis1"
aaaaaaaaaaaaaaaaaaaaaaaaaaaaaaaaaaaaaaaaaaaaaaaaaaaaaaaaaaaaaaaaaaaaaaaaaaaaaaaaaaaaaaaaaaaaaaaaaaaaaaaaaaaaaagatacctataaatacccccgcacagtgcccttgagaggctagattaacagagcttttgccatctcgaattgaaaccttgtttacgttgcccccactcccccgttggatcaacttgctcgggagagcaagttccaacatttggcgcccaccgtggggctcgaacccacgaccttgctgacctcgccgaaacgtttgcgaacatgcgggacgcacgacttcgcctaaaccccgaaaagtgcgtcttcggcgttcgccaggggaaaatattgggctacctggtgtcacaccacggaatcgaggccaacccaaccaaaattcaggccatcatcaacatgacgcccccgcagtcagccagagacgtccaacgcctgacaggcagattggccgcccttaacagattcatctccaaatccgcagagcgaagtctccctttcctcaaaactctccgcggcgcaaaagacttcgcttggggaccagagcaggcggcgtccttcgccttattgaagcagtacctgttggaattggcgatttttacaagccccgactcctcgctacccctgttgctctatgttgcggcttcgccacatgcggttagcgcagcattggttcaagagcagaccacagagggcatgatcaggcaatgtctagtttattacgtctccgaagtgctcacaccatc

SEQ ID NO: 325 - DNA, 777 bp, Zea mays
  VARIATION (7)..(109): /replace="c" or "g" or "t"
  misc_feature (7)..(109): /note="Nucleotides given in the sequence have no preference with respect to those in the annotations for said positions"
  source: /note="Zea mays BAC clone full insert sequence bacm.pk147.d02.fis2"
atcgccaaaaaaaaaaaaaaaaaaaaaaaaaaaaaaaaaaaaaaaaaaaaaaaaaaaaaaaaaaaaaaaaaaaaaaaaaaaaaaaaaaaaaaaaaaaaaaaaaaaaaaatcaattggtatcagatttccaggttgatcggtgagtttatcgagcgttttttttcctacagtccacaaaaccacataaaaattcaggttagatcttatcccagcacccttttgagcctcgcactttctttcaataatctgcattgttgaatttgtgtgctttcgcgtcatttgttgctggttgcattgtgttcttccaccattcaaaccctagcgtcgccaccatctcccgtttgatcacgccacaaaccgagtcaacatcgtttccttatttttctccttcggttacgtcaaaaaaaaaacagaaaaaacaaaccgagtcaacggccgtttccttgattttctccttcggttacgaaaaaaaaagaaaaaaaaacataccgagtcaacggccgcttccttgtttttctccttcggttacgtcaaaaaaaacagaaaaaaaagataacgaaggagaaaggatacagttgcttcatcccggtcgtttttagaacataacttgaggtaccttccgtaaaacgggcataacttttcgctcgggtgtccaaaaaatctgaaatttttacaggagcttgttgacaccattctgagcccgggcaaactgacctccggtctgtttgggttcgaccaaatgtcaaaaaattcggaaaataaagaaaaatccgtcaa

SEQ ID NO: 326 - DNA, 728 bp, Zea mays
  VARIATION (4)..(85): /replace="c" or "g" or "t"
  misc_feature (4)..(85): /note="Nucleotides given in the sequence have no preference with respect to those in the annotations for said positions"
  VARIATION (524)..(524): /replace="c" or "g" or "t"
  misc_feature (524): /note="Nucleotide given in the sequence has no preference with respect to those in the annotation for said position"
  VARIATION (542)..(542): /replace="c" or "g" or "t"
  misc_feature (542): /note="Nucleotide given in the sequence has no preference with respect to those in the annotation for said position"
  source: /note="Zea mays BAC clone full insert sequence contig bacm.pk147.d02.fis3"
gacaaaaaaaaaaaaaaaaaaaaaaaaaaaaaaaaaaaaaaaaaaaaaaaaaaaaaaaaaaaaaaaaaaaaaaaaaaaaaaaaaatcgttttaaaagccgttttccattcatcaccgagtttcattctaatctgatggtaaccgctacgcaaatcaaccttagagaaaataacggcaccactaagctcatctagcatatcatcaaggcgtggaataggatatcgataacgaactgtgatgttattaatagcacgacaatctacgcacatacgccatgacccatctttctttgggacaagtaaaataggaaccgagcaagggctaagagactcacgaatgtaacccttatcaagcagcgtctgcacctggcgctggatctccttcgtctcctctggatttgtacggtacggggcgcggttcggaagagaagcgccggggatgagatcgatctgatgctcaatgccacggaggggaggaaagaccggtggtaagtccgtaggataaacatcagcatactcctgcaaaaggttaacacagcaggaggtatatccaaagacggtgcatcatcaagcggaacaagcatgcgcgagcatacaagtgcataacagggcatatgagcttcatggagatcatcaaaatcagcacgtgtagccagtaaaacaggagagtgcaacttgatttcagattaataggtgcggctgatgtcgatttgacttgttgggcagttt

SEQ ID NO: 327 - DNA, 761 bp, Zea mays
  VARIATION (6)..(108): /replace="c" or "g" or "t"
  misc_feature (6)..(108): /note="Nucleotides given in the sequence have no preference with respect to those in the annotations for said positions"
  VARIATION (689)..(689): /replace="c" or "g" or "t"
  misc_feature (689): /note="Nucleotide given in the sequence has no preference with respect to those in the annotation for said position"
  VARIATION (693)..(694): /replace="c" or "g" or "t"
  misc_feature (693)..(694): /note="Nucleotides given in the sequence have no preference with respect to those in the annotations for said positions"
  VARIATION (716)..(716): /replace="c" or "g" or "t"
  misc_feature (716): /note="Nucleotide given in the sequence has no preference with respect to those in the annotation for said position"
  VARIATION (746)..(747): /replace="c" or "g" or "t"
  misc_feature (746)..(747): /note="Nucleotides given in the sequence have no preference with respect to those in the annotations for said positions"
  source: /note="Zea mays BAC clone full insert sequence contig bacm.pk147.d02.fis4"
atcgcaaaaaaaaaaaaaaaaaaaaaaaaaaaaaaaaaaaaaaaaaaaaaaaaaaaaaaaaaaaaaaaaaaaaaaaaaaaaaaaaaaaaaaaaaaaaaaaaaaaaaaagatatattttatattgctggcaagtacaacaacataggacaatttcttgtgcatagaatttctatttcatctagatatgttgtttcttcactttgtgcaaataagatattggtatgttctcaagaagaaaagaatctcttgtttccatgtactttagttgaagtttcaggtttatatttgaaagacattaataaaagcttagtcatcaacatcaagcatgatgcaaaaccgaggacggtttgctatcaagaaggggagaatgatgagaacataacccgtacagatatgaccatgttaatggctcctgctacaaagacattgaggaacaaagaagttgattggggaccaagtaatgatatttccaacatttccaacaaagcaagcacatcatcaaatttaaagatatacttgggtgaggagcatacactagagtcgaggacgactctattacaagaaggggaggatgatgaggacatcactgccatcaatacaccacaccagcgacctctttcaccatttaatcatggaccagtgaaacgagtccgtgcacgtaaatttaattatcaggtgaactcgttccattgaatgtgaagctaatcattccttaaatgaggtactaataccttgtgattactttaaatatctaaggtgtt

SEQ ID NO: 328 - DNA, 699 bp, Zea mays
  VARIATION (2)..(36): /replace="c" or "g" or "t"
  misc_feature (2)..(36): /note="Nucleotides given in the sequence have no preference with respect to those in the annotations for said positions"
  VARIATION (64)..(64): /replace="c" or "g" or "t"
  misc_feature (64): /note="Nucleotide given in the sequence has no preference with respect to those in the annotation for said position"
  VARIATION (599)..(600): /replace="c" or "g" or "t"
  misc_feature (599)..(600): /note="Nucleotides given in the sequence have no preference with respect to those in the annotations for said positions"
  VARIATION (641)..(641): /replace="c" or "g" or "t"
  misc_feature (641): /note="Nucleotide given in the sequence has no preference with respect to those in the annotation for said position"
  VARIATION (657)..(658): /replace="c" or "g" or "t"
  misc_feature (657)..(658): /note="Nucleotides given in the sequence have no preference with respect to those in the annotations for said positions"
  source: /note="Zea mays BAC clone full insert sequence contig bacm.pk147.d02.fis5"
caaaaaaaaaaaaaaaaaaaaaaaaaaaaaaaaaaataaattccactcggtcgaggtcgacggaatcgttactgcaagagtacatcatctgcaccaatctgttcttcgggtggttccttagtgcctgcatcatcagccgcaagcaaagcaagtgtagcttcatccaaatcactagcagaggaatacccaccatcattttttaccaccaaaacacgctgattaggacaatcacgctgcacgtgtccatagcccttgcatcgataacacagaacatctcttgttctacccgtggaggctactgaagaggcactacctgctggtttctgggcagatttggttgctgaatttgtggaagatgcacgtggtttgtcgccggaggaaggcgggggtgctggtcgacttggcgagggagttggtgctggtgtacggccggtcatggacgtagtcgtgcgctgttgccatggtgtagattttcctgcagaaacattagaccttgcactagcacgtcgtccctgcacttccctttcagctttgcaagcaagatggaacaatcgggttacattagcataatctttataagcaaggatgtcttgaatttaaccctattaacccggccaaaaatctagccatagcagaatccatcaccctcctctatgaatacacgcagcattacccatttggtaattctggatataatca

SEQ ID NO: 329 - DNA, 791 bp, Zea mays
  VARIATION (7)..(108): /replace="c" or "g" or "t"
  misc_feature (7)..(108): /note="Nucleotides given in the sequence have no preference with respect to those in the annotations for said positions"
  VARIATION (624)..(624): /replace="c" or "g" or "t"
  misc_feature (624): /note="Nucleotide given in the sequence has no preference with respect to those in the annotation for said position"
  VARIATION (655)..(655): /replace="c" or "g" or "t"
  misc_feature (655): /note="Nucleotide given in the sequence has no preference with respect to those in the annotation for said position"
  VARIATION (662)..(663): /replace="c" or "g" or "t"
  misc_feature (662)..(663): /note="Nucleotides given in the sequence have no preference with respect to those in the annotations for said positions"
  VARIATION (675)..(675): /replace="c" or "g" or "t"
  misc_feature (675): /note="Nucleotide given in the sequence has no preference with respect to those in the annotation for said position"
  VARIATION (736)..(736): /replace="c" or "g" or "t"
  misc_feature (736): /note="Nucleotide given in the sequence has no preference with respect to those in the annotation for said position"
  VARIATION (751)..(752): /replace="c" or "g" or "t"
  misc_feature (751)..(752): /note="Nucleotides given in the sequence have no preference with respect to those in the annotations for said positions"
  VARIATION (766)..(766): /replace="c" or "g" or "t"
  misc_feature (766): /note="Nucleotide given in the sequence has no preference with respect to those in the annotation for said position"
  VARIATION (777)..(777): /replace="c" or "g" or "t"
  misc_feature (777): /note="Nucleotide given in the sequence has no preference with respect to those in the annotation for said position"
  source: /note="Zea mays BAC clone full insert sequence contig bacm.pk147.d02.fis6"
atcgccaaaaaaaaaaaaaaaaaaaaaaaaaaaaaaaaaaaaaaaaaaaaaaaaaaaaaaaaaaaaaaaaaaaaaaaaaaaaaaaaaaaaaaaaaaaaaaaaaaaaaacagcacgcatgtgatcaacatgttcatccatagatttgctgtagatcaatatgtcatcaaagtatactaccacaaattttccaatgaaggcacgcaaaacctcgttcattaatctcatgaaagtgctaggtgcattagttaacccaaaaggcatgactaaccactcatacaatccgaacttagttttgaaagcagttttccattcatctcccaatttcatacgaatctggtggtacccactacgcaaatcaactttagaaaagacgatggcaccactcaattcatcaagcatatcatctaaacgtggaatagggtgtcgataccgtatcgtgatattattaatagccctacaatcaacacacatacgccatgttccatcttttttaggcactaaaataaccggaacagcacacggactaagagactcacgcacgtaacctttgtcgagtagttcttgcacttgtcgctgaatttctttttgttcctctggatttgtcctatatggcgcacgatttaggcaagatgcaccaggaaaatagatcatttagtgctcaaatcctcgtataagtggcagcccctctggtatctcacttggaatacatcagaatactcctgcaaaaatgtagtaaatacagggagcaaaagatgctgcatatcatggaattgaaatcaaagcatccttt

SEQ ID NO: 330 - DNA, 719 bp, Zea mays
  VARIATION (10)..(78): /replace="c" or "g" or "t"
  misc_feature (10)..(78): /note="Nucleotides given in the sequence have no preference with respect to those in the annotations for said positions"
  VARIATION (696)..(697): /replace="c" or "g" or "t"
  misc_feature (696)..(697): /note="Nucleotides given in the sequence have no preference with respect to those in the annotations for said positions"
  source: /note="Zea mays BAC clone full insert sequence contig bacm.pk147.d02.fis7"
gaccgcgaaaaaaaaaaaaaaaaaaaaaaaaaaaaaaaaaaaaaaaaaaaaaaaaaaaaaaaaaaaaaaaaaaaaaaaactgcacgaaactactaaagaaaacatagagcgtatgaatgctagatataagtttgctagtgataaaggtagaaaggaaataaattttgaacctggagatttagtttggttgcatttgagaaaggaaaggtttcctgaattacgaaaatctaagttgttgcctcgagccgatggaccgtttaaagtgctagagaaaattaacgacaatgcatataggctagatctgcctgcagactttggggttagccccacatttaacattgcagatttaaagccctacttgggagaggaagttgagcttgagtcgaggacgactcaaatgcaagaaggggagaatgatgaagacatccacactactgatgcatctataccaatacaagtaccaatttctggtcccattactcgcgctcgtgctcgtcaactcaaccatcaggtgattacactcttgagttcatgtccatcatatttagaccatggagacccgtgtactcttgttttgcttaggaatcagggagaagaccgaagggaaaaggatttgacatgctggattcggactgcagaagaaacacaacttgtgacggtcaccacggtcagatgcgggctcggattggaatgttaacagcacacatggaaagcttatc

SEQ ID NO: 331 - DNA, 893 bp, Zea mays
  VARIATION (828)..(828): /replace="c" or "g" or "t"
  misc_feature (828): /note="Nucleotide given in the sequence has no preference with respect to those in the annotation for said position"
  source: /note="Zea mays BAC clone full insert sequence contig bacm.pk147.d02.fis8"
ctcaaaagtcgttcctaagggaatgcagagccaaataccaccgaaatagaaggtgaagaagctccaaagtcgttcctaagggaatgcagagcttaaatgccaccgaaatagaaggtgaagaagctccaaagtcgttcctaagggaatgcagagcttaaatgcaaccaaaatagaaggtgaagagactccaaagtcgttcctaagggaatgtagagtctgggtatggtttcgtgtgtgttcgggtcatacatttgcatatttcatggcatcattctttgcattcatacaaacatttattagacattcgtaggatcatcatcatgatgacaagaagcacggacaataatatgaacagaaagagttgtacggcttcggtgacaaaatgcttcgttgaatatgaaaaagcttcgtctcagacaagaacagaggcattttatacaatgaaatgctccgatgtgtacgaaaagaagggaaggtgtttttcgccttcggctcaaaagttatacttatgggtttcgtccatagcaaagcaattcacacatggatggaaagttaaaattatattacaaggtatggacaaataaacacaatatcgagttcagccctcaattacaatcttttgcaaaataatgcaaaaagatcctaggctctatgcagggtcataaaagtaagcttcagcccagcaaccttcggaatgcgcttcggctcactgaccttcggtgccgccatcctgcagacaaacaacggtatgaggtaaatgcgatggtaataaagaaaaatcaaggcaaataacaggtgcaagtttcgtaccgaattaagcaaattccagggcttcgtctgcagctaactctcgtccgcctttagcccaaatttgagtaaataatctttttcta

SEQ ID NO: 332 - DNA, 666 bp, Zea mays
  VARIATION (657)..(657): /replace="c" or "g" or "t"
  misc_feature (657): /note="Nucleotide given in the sequence has no preference with respect to those in the annotation for said position"
  source: /note="Zea mays BAC clone full insert sequence contig bacm.pk147.d02.fis9"
gttttcatataataatagctatcaagaaagcatcaagatggcacccttcgaagctttatatggacgacgatgttgtactctgctaaattggtctgaacctggtgaaaggtacttcttcaggcctgatatggtgaaagagactcaagagaaggttcaaaaaataattcataatatgaagaaagcccaagctcgtcaaaagagttatgcagaccggcgacgacaacccttatactttctcgtgggagattatgtctacttgaaagtttcaccaatgaagggtgtattgcgttttgggattaaagggaagcttgcacccaggtacattggtccattccctgtacttgagcaatgtggaccagtggcataccgacttcaactacccgaaactttgtctgctgttcataatgtgttccacgtgtcccaattgaagaaatgtcttcgggttcccaatcgaaccattgaagtgacagatgttgtccttgaaccagacttgacatattccgagcatcccattcgagtcttggatcagaaggacaggattacccggagaaaaactctcaagttttacaaggtacagtggaaccaacattccgaagatgaggctacatgggaaactcaagactttttagataagaatttcccaggcttttagcctcatgtaattgg

SEQ ID NO: 333 - DNA, 1219 bp, Zea mays
  VARIATION (1142)..(1142): /replace="c" or "g" or "t"
  misc_feature (1142): /note="Nucleotide given in the sequence has no preference with respect to those in the annotation for said position"
  source: /note="Zea mays BAC clone full insert sequence contig bacm.pk147.d02.fis10"
catgctcattttctccccttgggatatttttatagaaaatccctcgaaagaagcttccaatctttggacaacatccaaatacttctcaagcttcggatctcttgccttgctactcttatccacgtggccagaaataacttgcgaatcagttttgaggattgccctttttattcccattgcctttagttttcgaagctccaaaagaagggcttcgtactcggcaatgttattcatacaactgaactctagctttattgcataacatgttataactttagagggtgcaactaggacagcaactgctcctgcaccgaatgtaccccaagatccgtcacaaaataccgtccaagcttcggcatcttttgtcacttcttgaccctgagcccctggcgtccaataagcgatgaagtctgctaacgcctgagattaaattgaggatctgtgcacataatcaatggtgaatttcattaagtctgtgacccattttccgatccttcatgtagcttctctattcctcattatgtctttcaaggattgcgatgaaggcactattatatgatgtgcttggaagtagtgctgaaagctccttgaagccttcaatacagcatacagtacattctccaattctgtattatttttatttgacaggctgagtacttcggagacgaagtgtaccggcgcttgcttttttatttggccatcttgcttctcctgtacaagtgtcgcactaaccgcagcatgggaagcagccacatacagaagtagcggagttcctgatgaaggtggggttagagttgtcaactctatcatatattgctttaattcttcgaaggctttctgttgaaccggaccccactggaagacttcggctgactttagtatttcaaagaatggtaaatttctctctgctaatcgtgagataaatctattcaacgatgccagccttcctgccaaccgttgagcccccttctttgaatttggtggctccatccgaaggatagcttcgatcttgcttggattagcttcgatacctttagttgataccaggcaaccaagaaacttgcccttcttcactctgaaaacacatttttcggggttcaacttgagaccagcttgtctaaaattggcaaacgtctcttccaaatcagcaacatcattttcttgttttgtgcttttcactatgatgtcatcgacataagtcaacacattcctacctatt

SEQ ID NO: 334 - DNA, 784 bp, Zea mays
  VARIATION (724)..(724): /replace="c" or "g" or "t"
  misc_feature (724): /note="Nucleotide given in the sequence has no preference with respect to those in the annotation for said position"
  VARIATION (774)..(774): /replace="c" or "g" or "t"
  misc_feature (774): /note="Nucleotide given in the sequence has no preference with respect to those in the annotation for said position"
  source: /note="Zea mays BAC clone full insert sequence contig bacm.pk147.d02.fis11"
tctttgctaggcgagaaattctactttgatgtttggatgaagggcggtcgtgagatggccgatgaagccattaaaaagagcgaaaaagaaactcacgacgctcgaaaggaggcaaagcaagctgaagaagctgctgaacgagccatgattataggtacttatatttaaagtttcgcttcatcgttcgcttctagcttcgaggtttatcaacatattcttttattgcagctagactttcacccccgccagagccgtacaaccctgaggtcgacccggttatgaaagaagctttagatgtaatgaagattggcaacgaagtcgttgacaaagtcgtcggcatactattgcatgaagttgctgagaaaataataaaggaagattaaatttttgtatgcttgaaaaatgtaatgcttgtgtatggttgcctccatgtgtacgaaacaaacataaagtacttgtatgtacattagtgtaatatatatctttgtgatgcatgaaatatgcgtacatatcatttttgagcctttggcgaaaaaacaccttcccttcttttcatgcttggcaaagaaaatcttccttacgccacttttgacgaaggttggcttcatataattcaatatgtctgacgaaggtatatgtcgtgctatagcacattttttgcgattcgacaagtatttttgaaggagtaatttcccttcttctccacagccttttgttgatgcaaaatgatgtatgatgagatgctatgcgatatggtatgattgtatgatgcaaaatgatgttt

SEQ ID NO: 335 - DNA, 1139 bp, Zea mays
  source: /note="Zea mays BAC clone full insert sequence contig bacm.pk147.d02.fis12"
gactagcaccgcttaatttttcactaaaataagcaactggttttccttcttgtaacaaaacagcacctagcccaataccgctagcatcgcattcaagctcaaaaactttattaaaatcaggcaattgcaagaggggagcttgggttaacttatctttcaaagtgctgaacgctacctcctgcgaatcactccaagcaaacggcacatctttctttgtaagctcatgtagaggcgctgcaatggagctaaaatcacgaacaaatctgcggtagaaaccggcaagtccaagaaagctccgaatttgtgtgaccgtcgtcggtgtaggccactcccgaatggcagcaatcttgctgctatccacctcaatgccctgcggagtaaccacataaccaagaaacgagacacgttgcgtgcaaaatgtgcacttttccatgttaccaagcaagcgagcagcacgcaaagcgtcaaaaacagcacgcaaatgttctaaatgctcctctatagacttgctgtaaataaggatatcatcgaaataaacaacaacaaacaaacctatgaaggcccgtagaacttcgttcattaaacgcataaaggtgctggagcattagtcaatccaaatggcataaccaaccattcatataaaccaaatttcgttttaaaagccgttttccattcatcaccgagtttcattctaatctgatggtaaccgctacgcaaatcaaccttagagaaaataacggcaccactaagctcatctagcatatcatcaaggcgtggaataggatatcgataacgaactgtgatgttattaatagcacgacaatctacgcacatacgccatgacccatctttctttggaacgagtaaaacaggaaccgagcaagggctaagagactcacgaatgtaacccttatcaagcagcgtctgcacctggcgctggatctccttcgtctcatctggatttgtacggtacggggcacggttcggaagagaagcgccggggatgagatcgatctgatgctcaatgccacagaggggaggaagacccggtggtaagtccgtaggataaacctcaatcaaggtatcgatccgtcgcctcgcgagttgtaggtcccattccccataggatctatcgcctc

SEQ ID NO: 336 - DNA, 876 bp, Zea mays
  VARIATION (723)..(723): /replace="c" or "g" or "t"
  misc_feature (723): /note="Nucleotide given in the sequence has no preference with respect to those in the annotation for said position"
  VARIATION (751)..(751): /replace="c" or "g" or "t"
  misc_feature (751): /note="Nucleotide given in the sequence has no preference with respect to those in the annotation for said position"
  VARIATION (765)..(765): /replace="c" or "g" or "t"
  misc_feature (765): /note="Nucleotide given in the sequence has no preference with respect to those in the annotation for said position"
  source: /note="Zea mays BAC clone full insert sequence contig bacm.pk147.d02.fis13"
aatatagccccaagtatttaaagaagagagcaaatttatttcttcagtttcgtttgcaatacaaattacatattcctttttagccaaaatgtttggttcaataatagatgtaacatgttcatttactagttgttgtcttagtacatgtgaatcattatcccacaaatcttcactatcacaagtgtcagcaatcaattcttcttgtgatgatggaaaaaacagctggtttcattattttgtgttcttgatcagcatgtagagcagatgcaaaagaggaactatggctcacatgttcagtgcttgtataattgtataatagaatctcattttcagctttacatgctagcaaaaacaagtgagaaatgtgtttgtatgcttcatgcatgactatagtctgaatttcagaattaagtcctttcatgaacctagtcatgacatcttccatgcattcatctaaacgagcaaacatggtacaaattttaaaatcataataataatctttcacagtcctagcaccctgctttaaggtgtctaatttagaaagcaaatgatcagcatagtatgcaggaatgaatgcatctctaaaatgaagtttgaagtcttcccaagattgtggaactttgttgtgcctacaaatgtatttccattccatcaatgcgtgctcagttaacaaattagaggcaatataaatcttttgtttttgagatagatcatgcttatcaaattccttatctacctttagctcccaatacatgtatgcatgaagatcgaatttaccggcatataaaggcaagtgttgaatgatgcctccaatataacgttcggttgggtcaaaaatgtccatatcacctgccccatgttagtaagacagaacaa

SEQ ID NO: 337 - DNA, 772 bp, Zea mays
  VARIATION (729)..(729): /replace="c" or "g" or "t"
  misc_feature (729): /note="Nucleotide given in the sequence has no preference with respect to those in the annotation for said position"
  source: /note="Zea mays BAC clone full insert sequence contig bacm.pk147.d02.fis14"
tagagacgattaaagaccaatatgttcatgatgctgattttaaagatgtgttgctgcattgtaaagatgggaaaggatggaacaaatatatcgttagtgatgggtttgtgtttagagctaacaagctatgcattccagctagctccgttcgtttgttgttgttacaggaagcacatggaggtggcttaatgggacattttggagcaaagaaaacggaggacatacttgctggtcatttcttttggcccaagatgagaagagatgtggtgagattggttgctcgttgcacgacatgccaaaaggcgaagtcacggttaaatccacacggtttgtatttgcctctacccgttcctagtgctccttgggaagatatttctatggattttgtgctgggattgcctaggactaggaagggacgtgatagtgtgtttgtggttgttgatagattttctaagatggcacatttcataccatgtcataaaactgacgatgctactcatattgctgatttgttctttcgtgaaattgttcgcttgcatggtgtgcccaacacaatcgtttctgatcgtgatgctaaatttcttagtcatttttggaggactttgtgggcaaaattggggactaagcttttattttctactacatgtcatcctcaaactgatggtcaaactgaagttgtgaatagaactttgtctactatgttaagggcagttttctaagagaatattaagatgtgggaggactgttttgcctcatatggaatttgcttata

SEQ ID NO: 338 - DNA, 751 bp, Zea mays
  source: /note="Zea mays BAC clone full insert sequence contig bacm.pk147.d02.fis15"
caaacagggtcctttcggagaggtactcaggaaaatggcctgagtcccctaaagtatcacaagaacatcatcgggataacatcatcgtatcataaataatcacatcatgttcattgattaagttaaagcaatagaataagctaaccatgataacccaaaaggtaaccaaggataaggtaatgtaatgcgggacagtgaattataaagtaaagtaggatgtgataggtctgaggacacttgccttcaccaggttcttgctcagggagatcttcggcaacacactcaggaatcataggttgctcgttgtctaaataaagcgatcatacattcaatacatttggaaagtacaaatgaacagcacatcaaacatatacaaacattggaacacatctcaaaaggtatattattaattaaagaagaaggagaacaaattataacatgaactaatcttaattaggagttgattactcttaagtgttgtccatgattacataatctaatactattcattttattgagacctaaaggttaaaccagagattagttcattcatcacatattattatcttcacaatattaaacatccatttaccactagggtttcctttttatttatttcattaagtggataaatcaatacatacactaacctatagttagacacaaaactagagtgcgcagactgtgaatgaacataatttatttgaacagagaatattcctatgaacattttgcaatttgaatcactaaa

SEQ ID NO: 339 - DNA, 1326 bp, Zea mays
  source: /note="Zea mays BAC clone full insert sequence contig bacm.pk147.d02.fis16"
taattggaatgtgagaccacttggatttgatgaagggtccttgcaccccaacatgatgtactcttctttgtgcttccttcttctgcttcttgttggctggttcagaacttgaaccgcctgtgattgggagcaccagcttcgtggccgaaggtgctacatcttggttgttgtgcgaagccatcgtcacaactgtggaagtgagttcaccagaggtgggcgccaatgttggtccttgttctcgaatgttatacaccaagaacaaagcaacacaattgttaatggataaggaacttcgtccttcgagacattatctcccttgagacataatgatcctcggacaaaggtcatgaagggtgtaccttcatcttctcagtaaatgaatataaaagaagaaacatgtaatacataagaatgtaaataatggcaatgtagaaatagattatttacattcttatttcattttataaacatgaacaaatgctcataatatttaaatttcattgataccttcggctcaacagaaggcgagagtgtgagagacgcgggagcaattacaatgcagcgtgaacaatacatgggtattgttcatctatttttaggcacaagatgcagcctggacgaaattacatccatgtccctgataactaattatgatcataatacaaactatgagggactaaacagtcttttcctctctaagtcggtatcgtcctttgtctttatcatgacatcaagccgaagctcttttaatcgaagctttggctttgtccgcatcacctttggtttatatcttcatgtgacaccttcctttatatggtcttaccaaaggtgtttttgcctagaggaccttcggcggagaagaagacccccaacaggggaggtgcctgggataagctctatggcaaattcaattttcctttcaggtggcatgcctgataactcttcagggaacacgtcggggaattccgacacaattctaattgcctcaatcagattggactctttgtcatctactgataaatggtgacagcctccttcttctagttcaggcaagtacatcttagttactacttcctttccgaacagggacaccaacttaactgttctcttgtcacaactgacggtggcttagtttctgtgtagccagttcatcccttggatgacatctaaaccttgagttcccattactactaggttagcggggaagtctatcccccttattttcatccttagattcagacaaatcctatcggactgaacttttgccccaactgaaattactcttaaaggtgggatcattgggtcctatgggggatgttatttgct

SEQ ID NO: 340 - DNA, 619 bp, Zea mays
  VARIATION (594)..(594): /replace="c" or "g" or "t"
  misc_feature (594): /note="Nucleotide given in the sequence has no preference with respect to those in the annotation for said position"
  source: /note="Zea mays BAC clone full insert sequence contig bacm.pk147.d02.fis17"
gagaggtgctatatccttgcacataaacaatctttttagcctatctttaataggaaagtatcgcaaaactttgcaaggactagctttccttctttgtttctttattaaaaccgactcaggttgcatacccttccaccgtgaggccttacaggtagagcagaaaccatcatcttttttcccttccaaaatagttggcaattatttggacaagcatgaatgtcctcataccctaatccaaattttgaaataatttttttggcttcataaaaattcttggggagttgttgtccatttggaatagccatacgaagaatgtcaagaaggtcaccaaaagttttatccgtccatttgttcattgattttatattaaatagaagcaccaataaagtcagaattgtcaactcacatcctgtccatagcagcttattggattcctcaatcatcttataaaactttgctgcatccaaacaggaccctttcgtaggagcattgtcatcaaccataagtgtgtcatcatacatgtgttgtattgtatcatgaattatttgcgtcatattaacttgtctttcgttactacaactattttgacccataataatattttcatgcccagaagtat

SEQ ID NO: 341 - DNA, 1479 bp, Zea mays
  VARIATION (41)..(41): /replace="c" or "g" or "t"
  misc_feature (41): /note="Nucleotide given in the sequence has no preference with respect to those in the annotation for said position"
  source: /note="Zea mays BAC clone full insert sequence contig bacm.pk147.d02.fis18"
tgataatgacatgcaggtgacgaatgaaaagatggggcaaattggaggccacacagatcgacacgaacaccaaacttgcaaatgtggaaatgacagttgctcatattgacaagagccttgtcgcactcttgaggcggtttgatgagatgcatgctaatatcaatggtgggcgtgatgagggcgccgaaggtaactgggatgactatgttgctgatactgaacaagatgaccaagaagcacctaatcgccggcgactacgtactaaccgtagaggtatgggtggttttcaccgacgtgaggtacatggtaatgatgatgcttttagtaaggttaaatttaaaatacctccttttgatggtaaatatgaccctgatgcttacattacttgggagattgcggttgatcaaaagtttgcatgccatgaatttcctgagaatgcgcgggttagagctgctactagtgagtttactgaatttgcttctgtttggtggatagaacatggtaagaagaatcctaataacatgccacaaacttgggatgcgttgaaacgggtcatgcgggctagatttgttccttcttattatgcacgtgatatgttaaacaagttgcaacaattgagacagggtactaaaagtgtagaagaatattatcaggaattacaaatgggtatgctgcgttgtaacatagaggagggtgaggaatctgctatggctagatttttgggcgggttaaatagggaaattcaggacatccttgcttataaagattatgctaatgtaacccgattgtttcatcttgcttgcaaagctgaaagggaagtgcagggacgacgtgctagtgcaaggtctaatgtttctgcaggaaaatctacaccatggcaacagcgcacgactacatccatgaccggccgtacactagcaccaactccctcgccaagtcgaccagcacccccgccttcctccagcgacaaaccacgtgcatcttccacaaattcagcaaccaaatctgcccagaaacccgcagacgatggtgggtattcctctgctagtgatttggatgaagctacacttgctttgcttgcggctgatgatgtaggcactaaggaaccacccgaagaacagattggtgcagatgatgcagagcattatgagagcctcattgtacagcgtgtgcttagtgcacaaatggagaaggcagagcagaatcggcgacatacgttgtttcaaacaaagtgtgtcattaaggagcgttcatgtcgtttgatcattgatggaggtagctgcaacaacttggctagcagcgacatggtggagaagcttgcacttacgaccaaaccgcacccgcatccatatcacattcaatggctcaacaatagtggtaaggtcaaggtaaccaagctggtacgaattaattttgctattggttcatatcgtgatgttgttgactgtgatgttgtgcctatggatgcttgtaatattc

SEQ ID NO: 342 - DNA, 1518 bp, Zea mays
  VARIATION (1422)..(1422): /replace="c" or "g" or "t"
  misc_feature (1422): /note="Nucleotide given in the sequence has no preference with respect to those in the annotation for said position"
  source: /note="Zea mays BAC clone full insert sequence contig bacm.pk147.d02.fis19"
ccccctttttcccccggggggaagggggggccaaacccggccggggtttggccccccccccgggtgtggtccccgggatttttccgggccccttgtttccaaggggttttgggcccaggttttggggagtgcccccaaccaaaggcgttcccttgggttataacgggacacaatgggggagttccttctccagcccagggatttcggagggaactaggtcatgcttatgattgccactaccccatgcagaaaatgaggaagtccacgttgatcccatcgacgccgataggtatgagagtcttgttgtgcagcgtgttctcagcacacaggttgcccaggccgaaaaaaatcagcgacacactctattccataccaagggcgttgtgcacgaacggtcgattcgcatcatcatcgatagtggcagctgcaacaatttggcaagtacagcgttggtagagaaattatccttgcccactcgctcacacccacatccgtatcacatccaatggctcaatgatggtggtaaaataaaggtaacacgttcggtacgtgtccccttttcgctgggttcttattctgattatgctgattgcgatgttattcctatggaagcatgctctttgttattgggtcggccttggcaatatgatactgatagtttacatcatggtcgttcaaatcattattctttcatgtttaaaggccagaaaataattatacatccaatgacccctgaccaaattttgaaagatgaccttactagggctgctaaaactgcacaacaagtcaaatcaacatcagccgcacctattaaatctgaaatcaagttgcactctcctgttttacttgctactcgtgctgattttgatgatctccatgaagctcatatgccctgttatgcacttgtatgctcgcgcatgcttgttccgcttgatgatgcaccgtctttggatataccccctgctgttgttaaccttttgcaggagtatgttgatgtttttcctacggacttaccaccgggtcttcctcccctccgtggcattgagcatcagatcgatctcatccccggcgcttctcttccgaaccgcgccccgtaccgtacaaatccagatgagacgaaggagatccagcgccaggtgcagacgctgcttgataaaggttacattcgtgagtctcttagcccttgctcggttcctgttttactcgttccaaagaaagatgggtcatggcgtatgtgcgtagattgtcgtgctattaataacatcacagttcgttatcgatatcctattccacgccttgatgatatgttagatgagcttagtggtgccgttattttctctaaggttgatttgcgtagcggttaccatcagattagaatgaaactcggtgatgaatggaaaacggctttttaaacgaaatttaggttatatgaatgggtggttatgccatttggatttgactatgctcccagcacctttatgcgtttaatgaatgaagttctacgggccttcataggtt

SEQ ID NO: 343 - DNA, 704 bp, Zea mays
  source: /note="Zea mays BAC clone full insert sequence contig bacm.pk147.d02.fis20"
ctgagaatgtgcagcaatatcatggcatgaaaatttttgttcaacctctaactcccaatcaagatatgcagcaggatcatatttgccattaaaaggtggaattttaaatttaatcttagaaaataagtcattagggggatgacgaaccacacggcgtgcacgaccacggcgatctccatcttcccactcagtgtcaccgccgtagtcctgctccatctttgtggtcaacgcatcaaggcgtgccaggatggtgtcgagtgtggtgcgagtcgccgtttgggcaaggtcaagctggttgaaacgctcggtcgtcgaagtgaccgttgaatcaagccgttcatgcatcgtcctaatgtcatcagcaagtccatcaacttgtccccttacttccagcaactaggcatccaccgtgtcgtgtgctcccgccatagttagcgcaaacaccaaaacaccaaaagaagaaaaaaaacaacgacaaaaacaggggtgtactgctcacaaggcgctcacactagtgctattatcaaattcttatccgttcttaccaagccacagtggtgacctgcaaccaacaggtggaaccggtgaaagattggatgagcgattgcctggagaaacagaaaccttctcgtcgtagaaatatgtggagttttgggtaggctgcactctagtcaaggattagcacgaccaaacaataatgcaaa

SEQ ID NO: 344 - DNA, 942 bp, Zea mays
  source: /note="Zea mays BAC clone full insert sequence contig bacm.pk147.d02.fis21"
tcgtgtagctcctatcttgttgcttcttgtgctgagaaaaatatcaaaaaaatcatacaaaaaagaaaaacaaaatcacctgtgatttctactagtgcctttttggcatcactagtacaatatttacggtactgccattctgctagttccatccatcctttgcacctgtggccagcaatatagtttcgtgttttgcactataattcaactttgcattattgtttgatcgtgctaatccttgacttgagtgcagcctacccacaactccacatatttctacgacgagcaggtttctgtttctccacgcaatcgctcatccaatctttcaccggttccacctgttgattgcagttcaccactgtggcttggtaagaacggataagaacttgataacagcactagtgtgagtgtcttgtgagcagtacacccctgtttttgtcgttggtttttctccttttggtgttttggtgtttgcgctaactatggcaggagcacacgacatggtggatgcccagttgcaggaagtaaggggacaagttgatggacttgctgctgacattaggacgatgcatgaacggcttgattcaacgatcacttcgacgaccgagcgtttcaaccaacttgacctttctcaaacgacgactcgcaccacactcgacaccatcctggcacgccttgatgcattgaccataaagatggagcaggaatacggcggtgacactgagcaggacgatggagatcgccgtggtcgtgcacgtcgtgtggttcgtcatccccctaatgacttattttctaagattaaatttaaaattccatcttttaatggtaaatatgatcctgctgcacatcttgattgggaattagaggtagaacagaaattttcatgccatgatattcctgctaatagccaagtgaaggctgccattagtgaatttactgatt

SEQ ID NO: 345 - DNA, 686 bp, Zea mays
  VARIATION (512)..(512): /replace="c" or "g" or "t"
  misc_feature (512): /note="Nucleotide given in the sequence has no preference with respect to those in the annotation for said position"
  VARIATION (529)..(529): /replace="c" or "g" or "t"
  misc_feature (529): /note="Nucleotide given in the sequence has no preference with respect to those in the annotation for said position"
  VARIATION (653)..(653): /replace="c" or "g" or "t"
  misc_feature (653): /note="Nucleotide given in the sequence has no preference with respect to those in the annotation for said position"
  VARIATION (667)..(667): /replace="c" or "g" or "t"
  misc_feature (667): /note="Nucleotide given in the sequence has no preference with respect to those in the annotation for said position"
  VARIATION (673)..(673): /replace="c" or "g" or "t"
  misc_feature (673): /note="Nucleotide given in the sequence has no preference with respect to those in the annotation for said position"
  source: /note="Zea mays BAC clone full insert sequence contig bacm.pk147.d02.fis22"
tgccccatggtatcccattaatacaatggccgaaagcatctttaaaatcagcatcgtcaacatattgatccttcacagtgtccaaaccaaagattttaaaatctaattgtgacagcatggtatagcgacgagacaaagcatcagcaataacattgtccttcccgttcttgtgtttaataatgtaaggaaaggactcaatgaattcgacccatttagcatgacgacggttcagatttgtttgggtacgaatatgttttaaagcctcatgatcagaatgaattatgaactcacgatgccaaagatagtgctgccatgtatgcaaagtgcgcactaaagcgtaaagctccttatcataagtagaatatttcagactagcaccgcttaatttttcactaaaataagcaactggttttccttcttgtaacaaaacagcacctagcccaataccgctagcatcgcattcaagctcaaaaactttattaaaatcagtcaattgcaagaggggagcttgagttaacttatctttcaaagtgctgaacgctacctcctgcgaatcactccaagcaaacggcacatctttctttgtaagctcatgtagaggcgctgcaatggagctaaatcacgaacaatctgcggtagaaacggcaagtccaagaagctccgattagtgtgaacgtcgtcggtgt

SEQ ID NO: 346 - DNA, 842 bp, Zea mays
  source: /note="Zea mays BAC clone full insert sequence contig bacm.pk147.d02.fis23"
cttattcgaaagccgaagatactgcactgtcagcagccttcggaggccgaaaaaagaagaggctgaatcgggtgtttgatgcaatcgggttcgtctaccctgactatcgttaccccattcgagggcagaagagaaaaaacacaacctctgcaaaagaagaagctgcaactgctcctagcgaggcagaaccgaaaagaaaaaggataaaggtcctcacacatcgaccgcgctttattgaaccagcttcggtgcccgagttcaccggaggaatttcttcggccaccgaggctgaaaagccaatcaaatcaaccttgctgccagaagttgcagaaatggccgaagcgccaacaaggatagaattgaaagaatcgaagattttgctaccagaaaccaaagagatggccgaagcgccatccatagaaaaaatggaagaagtgaaaaaaccaactgcagaaaaaatatcagaagttttgagtcctgcaacagatattgagacagtaaaaaaccaaaaagtgccagcagtgactccgaaaagaaagagaatggcaaatgtgctagatgtactggaaacaattaaatcttcaagcacacctccgaagcagactactgccattcccgaagcgaaaactgaaatttctgatactaaagctccagagcaagaaactgaagccgaagctgggtcctcagggcccgcgaagataaaatccttggaaactgaggaagaaaaaataacagagccaatttttgttgaagaaatcggtgtcattgcccccgaagcatcctccaaagtccgtgattatattgttcgtcatgcttcggggaaaaaactatcagaaaaagaa

SEQ ID NO: 347 - DNA, 469 bp, Zea mays
  source: /note="Zea mays BAC clone full insert sequence contig bacm.pk147.d02.fis24"
agcgctcaagacgaagcccataaagctgaaatcgaaaatttgaagaaaaaccttgcagaaatgaatgaaaattttgaagttacaaaggcgaaacaagaaataagtgagatggaaagatccagagtgcaaaagaatgttgaagagcttcgggatgccaaggagagatgctacgaaacatctatagaatgcgcgaagaaactgaaagatggctttgccaaggtaggagcatactcttcggaacaaaagtttattcgtgttgatcccaaaggagttatctagtggattggtgaagtagccaaagctttcgatgaaattcttgatgatcgtggagatttctgcgcgttcgccggtgcacgaggggtcgaggcaattttggaaaaaaccggctgtgaacatgttaaagccgtagcccaggcagaagctaacttcttagctgacgacaccaaagacccttcgaccgaagcctctt

SEQ ID NO: 348 - DNA, 993 bp, Zea mays
  VARIATION (965)..(965): /replace="c" or "g" or "t"
  misc_feature (965): /note="Nucleotide given in the sequence has no preference with respect to those in the annotation for said position"
  source: /note="Zea mays BAC clone full insert sequence contig bacm.pk147.d02.fis25"
gccgcgaacactactatacgggagtgggattattccatcggaggcgaggatcgatatcctgaatgtaatttgtgtgggttgtgtcccgcgcctataaataggtgaacagtacccccgtactggagacgctgacttggcattcgctttttgcgtcacgcttgtattgtcatctctttccgattgaaggtacacttgtaattcaacgatatttctgtttatgcctgataataatatataattgttcatgttgtcttttatattctttacatttcatccttcgtcattgtttaatgaatttatgaaggtacgtcctacataaccttcgtccgtaaaccattatatcctaagagaaataatgtttcggaggacgaaggactttaacgattaacattctctatgttgccttgttcttaactcatagcacttgagaacaagtccccaacattggcgcccacctccggtgaactcacttccactctttgaagttttttgaacaccttcggcgatcataaatcttcgttatggcgccgaagaaagcttcagcgactggggctgcagttctgcaaccactggaccacaatcaggagacagtttccctgcgggaggcccgaagccagaaaaggaaggctgtcagtccgacaccaccagaggacgagatagatcaagaaatcagagatatggagatgcttcatcaacaagtacagaggaagaaagaaaagatggccaggctagctgaactgcagaggcagatagacgaagcctctgaagaagttcgtcatcttgctcaggatgagcaacaccgaaggcctcagcaccaagaccttcatcaggagggttttcccaacgaagatgactggtatgacaatttccatcatgggaattttgtttttgatgatgcttctcctttgtccgctgagctgcaggctacaccttgggcctccgtcctacaagccgcctcagcttcacgtattcgatggccactcagaccgaagc

SEQ ID NO: 349 - DNA, 1004 bp, Zea mays
  source: /note="Zea mays BAC clone full insert sequence contig bacm.pk147.d02.fis26"
ctctcaagcgcgttaacacgatccgtaaatgttgggcatgctcctcttcattcttggaatatattaaaatatcgtctatgaagaccaccacaaacttgtccaactcgggcatgaataccgagttcatcaaatacgtgaagtgggcaggagcatttgtcaatccgaaagacattaccaggtattcaaataatccataccgcatagtgaatgcggtctttggtatatcctcgggccgaatacagatctgatgatagcccgatctgagatcaatcttggagaataccctcgctccagtcagttgatcaaatagaatgtcaatccgtggaagagggtacttgttttttatagtgacctcattcaggggtcgataatccacacacatccgtaaagtttgatccttcttcttgacgaatatggctagacaaccccatggcgacgagcttggccggatgaatcctttctcaagtagatcttgtaattgaatcttcagttctgccaactcatttggaggcattcggtacgatcttctagatacgggagtcgtatcgggctgcaactcgattacaaactctacctccctttcaggtggcagtccaggcaaatcctctggaaagacatcgggaaactcgcatactaccggaatatccttgatctccggtataatggcttcataaactctgccagtagctttggttggaatggggataggcaaaagaatttcttcttggttatgactcaacctgatagttctctaatcagtgttgagggttgctttgtgtcgggccaaccaattcatgcccaaaatgacatctatgtcttggcctttcagaacaatcatattagtaggaaagtcccgtccggccaatgttacgggcacttgataggccacttctctagtaaatatttgtcccccgggtgagtgaattttaaacccttcttttgattcatggcatgaaatgcaatgttgctccacaaatttcttgctgatgaatgtatgcgaagcc

SEQ ID NO: 350 - DNA, 1039 bp, Zea mays
  source: /note="Zea mays BAC clone full insert sequence contig bacm.pk147.d02.fis27"
tcattacttggacccaattaaaaactgccatgcgccacagatttgttccttcctattatgctcgtgatttgcttaacaaaatgcagcgttttcaacaaggttcacagtctgttgaggattattaccaggagttacaaaagggtatgcttcgttgtggtttagttgagtcagatgacgctgctatggcgcgttttcgtggtggtttaaacagggaaattcaggatatacttgattataaggattattttgatataaccacattgtttgaatatgcttgcaaagctgaacgtgaagtgcagggacgacgatcaaagacatatactaactcttttgcaggccggggtccaacacacagctcaactccttccagccctgcacctcctacgcctagcactacatcgcgcacagggccggccaagccagtggcgccccctgccaaaggcgccgcttcttccacaggacgtacacgggatattcagtgccatcgttgcagagggtttgggcacatgattcgggactgcccaaacaagcgtaccttgcttatacgtgacaatggtgagtactcttcagccagtgattctgaggaaactagtcatgctatgattgccactaaccatgcagaaaatgaggaagtccacgttgatcccatcgacgccgataggtatgagagccttgttgtgcagcgtgttctcagcacacaggttgctcaggccgaaaaaaatcagcgacacactctattccataccaagggcgtcgtgcacgaacggtcgattcgcatcatcatcgatagtggcagctgcaacaatttggcaagtacagcgttggtagagaaattatccttgcccactcgcacacatccacatccgtatcacattcaatggcttaatgatggtggtaaaataatggtaacacgttcggtacgtgtccccttttcgctgggttcttattctgattatgctgattgcgatgttattcctatggaagcatgctctttgttattaggtcgaccttggcaatatgatactgatagtttacatca

SEQ ID NO: 351 - DNA, 1253 bp, Zea mays
  VARIATION (1184)..(1184): /replace="c" or "g" or "t"
  misc_feature (1184): /note="Nucleotide given in the sequence has no preference with respect to those in the annotation for said position"
  VARIATION (1198)..(1198): /replace="c" or "g" or "t"
  misc_feature (1198): /note="Nucleotide given in the sequence has no preference with respect to those in the annotation for said position"
  source: /note="Zea mays BAC clone full insert sequence contig bacm.pk147.d02.fis28"
ttcaagctcgctcgagtcgacggatattcaaaaagaggggtttgacacgccacaaaccgagtcaacattgttttccttgtttttctccttcggttacgtcaaaaaaaaacagaaaaaacaaaccgagtcaacggccgtttccttgattttctccttcggttacgaaaaaaaaacagaaaaaaaaacaaaccgagtcaacgaccgctttcttgtttttctccttcggttactaaaaaaaacagaaacaaaaaaaagaaaacgaaggagaaaggatacggttgtttcattccggtcgtttttaaaacataacttgaggtaccttccgtaaaacgggcataacttttcgctcgggtgtccaaaaaatctgaaatttttacaggagcttgttgacaccattctgaggccggccaaactcaccttcggtctgtttggtttcgacaaaattgtcaaaaaaaattcaggaaaataaagaaaaaattcgtcaaagttctcgcacgcttttcagagaacttcctgattttctgtagaccacatctgatttctgctttaggtgaaacttcgtgtagctcctattttgttgtttcttgtgctgagaaaaatatcaaaaaatcatacaaaaaaagaaaaacaaaatcacttgtgattcctactagtggcctcgctagtacaatatttacggtactgccattctgctagttccatccgtcatttgcacttgtggccagcaatatagtttcgtgttttgcactataattcaactttgcattattgtttgatcgtgctaatccttgacttgagtgcagcctacccaaaactccacatatttctacgacgagaaggtttctgtttctccaggcaatcgctaatccaatctttcaccggttccacctgttggttgcagttcaccgctgtggcttggtaagaacggataagaacttgataacagcactagtgtgagcgccttgtgagcagtacacccctgtttttgtagttggtttttctccttttggtgttttggtgtttgcgctaactatggcaggagcacacgacatggtggatgcccagttgcaggaagtcaggggacaagttgatggacttgctgctgacattagaacgatgcatgaacggcttgattcaacggtcacttcgacgaccgagcgtttcaaccagcttgaccttgctcaaatggcgactcgcaacacactcgacaccatcctggcacgccttgatgcattgaccacaaagatggagca

SEQ ID NO: 352 - DNA, 1470 bp, Zea mays
  source: /note="Zea mays BAC clone full insert sequence contig bacm.pk147.d02.fis29"
taggtcgtccactatgggccacagttgggctggtcgtctattcttctgggccctcattcttcagtagcatgacgaagttaagatctctggcacgggcccgagtgattggcccagctaatgaaggaagtggcgcttgatgtggaggtgctgctggtgtagtcgtactcatagtgatgtcctcatcacccttgagagtcttttctttagtcgggtaagacttgctgagtaattccatactcagggtttattcccccgttgtttttaggtgaggaagcaataaacttttgttgcttttgctccaaggtggttccaaatgaagaaaaacaagagtgaagctacgggaggacatggtcctccataaaaacttttatgtaaaaactatcgggaggagtttttgcctcccttggtattgtaataatactactcagcactcgttttataactctggtctgtaataaataacttgatctgactttctaaataaatgtaagtttatgtaattgcttccgcattcttgtaactccgatgcttgtaatgtctgcgtgacgggtaaaacgctcttgggaaaggtgagaaaagcagataccgaacttgtcaagtgattcaggggcacctacagggttgtctgaggtccgttggacaaggacaactgtaggtgggcctagttaattgggaggttccgtcacaggttctggttgcgaaaactcgtgctttgtatccaccctgacacccgttttcggaatgggtgacgtgcggcaacgaaattgcgcgaaaccaacccaaacatgagttttggacctaaagtagtgggttgggcatgttcgttgcgaaaaacgaagaaatggttccggtggcaaaaactcatgctttgtatgcacccgacacccgttttcggaatgggtgacgtgcggcaacaaaattgcgcgaaaccacccaaacatgagttttggacctaaagtagtggattgggcatgttcgttgcaaaaaacgacgaaattgttctggtggcaaaaactcgtgctttgtgatacacccagcccaggttgggttggccgaggcccaactaattagggttgcccggagcccaacagttcattaagcacacccaactcaaggaaaggcccaatcgccccaaaagactagtccaatgggggaagggtggctctcccttttaaagtggcttcctcctcccaagttaagcgaggtgggataattctgaggctcacacggttgccgtccgactacaattgggccaactggaccaattgcgtctttgccaacgggtaatagtggaggatgtcctcatcatttctaccttcttaaaatggatcctagctctgataccagatgatacacccagcccaggttgggttggccgaggcccaactaattagggttgcccggagcccaacagttcattaagcacacccaactcaaggaaaggcccaatcgccccaaaagactagtcca

SEQ ID NO: 353 - DNA, 986 bp, Zea mays
  source: /note="Zea mays BAC clone full insert sequence contig bacm.pk147.d02.fis30"
gtggcagcattatctttggcatcgtgagttcataattcattctgatcatgaggctttaaaacatattcgtacccaaacaaatctgaaccgtcgtcatgctaaatgggtcgaattcattgagtcctttccttacattattaaacacaagaacgggaaggacaatgttattgctgatgctttgtctcgtcgctataccatgctgtcacagttagattttaaaatctttggtttggacactgtgaaggatcaatatgttgacgatgctgattttaaagatgctttcggccattgtattaatgggaaaccatggggcaaatttcacatacaggatgggttcctgtttcgcgctaacaagctgtgtgttccagctagctcggttcgtcttttgttgttacaggaagcgcatggaggcggtctcatggggcattttggcgtctacaagacacatgaggtgttggctgcccacttcttttggcctcggatgcgcgctgatgtggagcgccttgttgcacgctgcactacttgtcagaaagctaagtcacggttgaacaaccatggtttgtatatgcctttgcctgtcccttcttctccttggcttgatatctctatggactttgttttgggcttgcctagaactaagaaggggagggatagtatttttgtggttgttgatagattctctaaaatggctcactttataccttgtcataaaactgatgatgctagcattgttgctgaattgttctttagagaaattattcgtttacatggtattccaaaaacaatagtctctgatcgcgatgctaagtttctaagccatttttggagatctctttggaataaattgggaactaaattgttgtttagcactatttgtcaccctcagactgatggacaaactgaggtagtaaatagaactttatctaccatgcttagggctgttttagacaagaatttgagacgttgggaggattgcttgcctcatg

SEQ ID NO: 354 - DNA, 1151 bp, Zea mays
  source: /note="Zea mays BAC clone full insert sequence contig bacm.pk147.d02.fis31"
cggctggtctggtcgttccctcatgcgagctggccgtagcccgggtgtacggtcgggtcccaagttctcgggctggtatgttgacgctgtcaacggtttggccggagccgggtttgcgagagcagcccccgagcctctgcacagggcgagaggggcgatcagggacaaactcgacttttttacatacgcccctgcgtcgccttttcgcaaggaggagggggggaaagcgccatgttgccctcgatgggcgtcgaacatggtgtctccggtgagctgcaacgggtaatccgagtggacgtccgtgccccattcgttaggggtcagctagaggcccggaggcgcgcccaaaagtacctgcgggtgatctgccggacccggtcccctggcgacggggtccgagggctcgatgcctccctccgatgggattccgttacaagatcgttcccgctggtctcggaaatgtcctagggtacctcgggagcgcagcccgagccttggttatgtatcgaacgtacccatggtcatccctcgctctgtgtctgaggcggctgtgaacccttcgggggccagccttcgaacccttgatcagtagtgggcgcggagcccgagtagcctaaggcggtcgttgaacccttccgaggggccggccttcgaacctctgaccagtagtgggtgtagagcccacgcgatctgaggcggctgtcgaacccttccgaggggccagccttcgaacctccgatcagtagagaggctcggagcctggttccttcacggggaaggatccttttcggggtatccccctttcccggtccctgttgcaagagagagaaagaggaaaaaaagggaaaggatacgaaatcgaacgacgtagcgtaccttttccgacgcggtcattatggcgaaggcgaagcgtcgctcgcttctcctgccataggcgccgcctgtcccaccgcggagttaatgtgacggggcgcgcggttcgcggggcggccgttgcgcgtgcgcgagccattcgaggaacggctgtttcgcttcgtgtttttgaatcccgcggtcggtcccgggcggaacgttgaacgggtctcgctttggtctttatatactcgagggaaggcctggcgatggttctttggctccgcttcctgcctccc

SEQ ID NO: 355 - DNA, 2135 bp, Zea mays
  source: /note="Zea mays BAC clone full insert sequence contig bacm.pk147.d02.fis32"
ttgtacagggaagcgcatggaggcggtctcatggggcattttggcgtctacaagacacatgaggtgttggctgcccacttcttttggcttcggatgcgcgctgatgtggagcgccttgttgcacgctgcactacttgtcagaaagctaagtcacggttgaacaaccatggtttgtatatgcctttgcctgtcccttcttctccttggcttgatatctctatggactttgttttgggcttgcctagaactaagaaggggagggatagtatttttgtggttgttgatagattctctaaaatggctcattttataccttgtcataaaactgatgatgctagcattgttgctgaattgttctttagagaaattattcgtttacatggtattccaaaaacaatagtctctgatcgcgatgctaagtttctaagccatttttggagatctctttggaataaattgggaactaaattgttgtttagcactacttgtcaccctcagactgatggacaaactgaggtagtaaatagaactttatctaccatgcttagggctgttttagacaagaatttgagacgttgggaggattgcttgcctcatgttgaatttgcttacaatcatgccacgcattcttctacaaagatgtgccctttccagattgtttatggttacattcctagggcacctattgatttgatttcacttaatgctgcgaacgccccacatgtagatgcttctgcacatgttgaacaaatgattaccatacatgaacaaacgaaacagaacattgctgctactaatacaaaaaatcaggttgctggtagtaaaggaagaaaacatgttacttttgaacctggtgatatggtttggttgcatttgagaaaggatcgttttcctactttgcgccgttctaaattgatgcctcgtgctgctggtccttttaagatactaaccaagattaatgataatgcttataccctcgacctacctgcggagtttggtgtttccactagttttaatgttgcagatttgaaaccgtatgcgggagaagatgaggagttgtcgtcgaggacgacttcagttcaagaaggggaggatgatgcggacatcaacaccaacacgagcacatctacaccagcagcaccttctccagcccaggcgccaccccttccacctgggccagtgactcgggcccgtgcaagagaattgaactacatcatgttgttaaagaacgaaggcccggaagaatagacgaccagcccaattgcggcccataatggacgacctagggttggccgcccctaggggttgcgccccctctctatttattcaggagctgcgcctcctttatttcctgagttttgttttacgttagccttagctactctcgaacacgcgcaaatctgcgctgtcttcgtgtattcagaactccaccctcgagtaatagattagattgctcgcatcttgttcttgttcgttcttcgattgcgcacaggaaacgatcttcgtgatcaggccgatctcgcatcagcaaggtcggtaaccacagggagttggttcagcgattgcattggcgcctcgggcttgctcgtcgtagtcggatcgcaagggtcatcttccgccaaatcggaattatctctactcgccgaaagatcgggcacctcagcttcatcaccagccaggtactgtaccatgggagagctcattcagtgcacctgacaaccaagttctagggcagtttttctcgaaaattttcatggtaacctacccaaacctctgcaagaaagctgtagagctacaaactagctacaactttgtcatagcaaccttggttaaattcttaataaatcaagcttgaattcatgctcaaagtctcagtggttgcactgtctgtctgaatttcagcccttatcagcctgacaatccaacttcagtattaattatctctaaattattctcaacaactatgcttacactcttaagcaaagttgttctcctttgtttggtctacaactttgatgtggttccctagggcaaaaaccctagaacttgaaacatacaaagctcaaaagttgagcccataactctgaaattcagacttaggctatatagggcttaagaggtgatttttgcaaata

SEQ ID NO: 356 - DNA, 2599 bp, Zea mays
  source: /note="Zea mays BAC clone full insert sequence contig bacm.pk147.d02.fis33"
gagagagatgctataacaaatctatagagtgtgttaagaagttaaaaactagcttcgccagggtcggcgccttctcaagcgaagaaaactttacgagggggaatcccgaaggtcccatcgaatggatcgaccacgaagctgaggccttcgaagaaattttaaacaaccgtggagatatatgtgccttctctggtgccagaggaattgccaccatcttagagaagaagggatgtgaacatgtaaaaattttagcacaatccgaatctgctttgtcttttgaagatgcaagagatccttcggcagaagctagtataattggtggaaaattttttaccgatatctgggataatggtggccgagaaatggccggagaaattattcgaagaagtgaaaagggcattcacgatgctagagaagtagctgaggctgctgaaaaaagcgcagaggccgaaggtcaattaggtattaactaatagtttttattgtgttgtaatcttaggctttaagatttgtttgcgatttgtaatagcaatgtagccgtatcctgtcttacttcagatcctgctaaagcgtcttcgggccctcagccgaaaggagacgacgaaattaaaaagatggctgaggatattatggatgaagtcgttaatcggctcctgaacgaggctgcagaagtcgttttgagagaagattaagtatttttgtaaaaacttctgaaatgtaatatactgtaacattttgtaaccccaaatgtaatatacctatttttgttagtcaattctttacgacgcatgaaactttacacgtaccgcttttgagtctttgacgaaaaaacaccttcccttcttttcatgcttcgtgaagaagaatttttctttgtcacaacaatatccaatgttctgatgattaatatccaggcttcgtgaagatattttccgaagctacacttccgaagaccaatgatgtatctttttgtgaccttgatttctccctttttttcaaagcgttcttctgtagattaataatgtgtccatctcttgtgccatgtgcaaaatgatgtatgatgcttatgccatgcgaaatgatgcgatgatgttatgttatgtgagatgacgtttattccgaagatacatacgcatccctgcaataaaacacaatcttttataagcctcccttaggagcttcttcgccttttacttcagcggaatcagcgtttatttttcgctgtaagcctcccttaggagcttcttcgccttttactttcagcggtattcgcattgacttttcgcgcttcgccttttacttaggcggtatcagcgttgacttttcgctgtatgctctgcattccctttggaacgactttggagcagaaaacttacactgcgctccctttggaacgactttttgtgacttcggcaaacttactctgcgttccttagaacaactttttgttgcttcgaagaattttcgatagttcgaaggtcctttttattatcacaggtctttgaacttcaatcaatttaagcctgtgaagaaaacatatttttcttgtaggaatcaacgaaactaattacatgaaacctaaataatgtcctttattacagaaaataaaactgaacgaaaaagattgctattaaggtaggatattcgtcaatagatgtgctttgactctggcacagtgctattgactgtacgagcttcggactgctctctgaagtccctctggtgtggagcatactggctcccttctggctgctggccttgttgcaacggaggtggaggcggaggctgttgccaggaagcttgaggctgactcgccgaagcaacagaaactgcaggatgattgcccacatattctgggatgtagggcgaatgatacgaagctgtatgcatgacctgcttcggctgagcttgttgtgctgcggcttcagctatttccttttgcttctgaatagtaacatggcacatcctggtagtatggcctttgttctctccgcagaataagcaaaagattcttctcggttgatcgccaaatcttcctccaaagcccctggcgactctgcctcttggagctggtggtcggaaggagctttgctgttgccccgaagcctgtgaggagctttgtggcctttgctgttggcttcctctatcatcattttgtgtagagttatgaattgatctcacgtgcctcgggtagaacctccctccgaagcccctggtcatttcagaaaacctgaaagcctcctcccttctttggcgaaaatcattatcggcccgaatgtactcgtccatcttctggagcagcttctccaaagtttgaggaggcttcctggcgaagtactgagctgacggtcctggccgaagccccttgatcatggcctcgatgacaatttcattgggcaccgttggtgcctgtgccctcaaacgcaagaaccttcggacatacgcctgaaggtattcttcgtgatcctgggtgcactggaacagagcctgagcagtgaccggcttcgtctgaaatccttgaaagatagtcaacaacaagtccttcagcttctgccatgaagtgatcgttcctggtcgaagggaggaataccaggtttga

SEQ ID NO: 357 - DNA, 1690 bp, Zea mays
  source: /note="Zea mays BAC clone full insert sequence contig bacm.pk147.d02.fis34"
gcgctaggatttgaatggtggaagaacacaatgcaaccagcaacaaggaaacgcgaaagcacacaaattcaacaatgcagattattgaaagaaagtgcgaggctcaaaagggtgctgggataagatctaacctgaatttttatgtggttttgtggactgtaggaaaaaaacgctcgataaactcaccgatcaacctggagctctgataccaattgatgtagctgaggtgcccgatctttcggcgagtagagataattccgatttggcggaagatgacccttgcgatccgactacgacgagcaagcccgaggcgccaatgcaatcgctgaaccaactccctgtggttaccgaccttgctgatgcgagatcggcctgatcacgaagatcgtttcctgtgcgcaatcgaagaacgaacaagaacaagatgcgagcaatctaatctattactcgagggtggagttctgaatacacgaagacaacgcagatttgcgcgtgttcgagagtagctaaggctaacgtaaaacaaaactcgagaataaaggaggcgcagctcctggataaatagagggggcgcagcccctaggggcggccaaccctaggtcgtccactatgggccgcagttgggctggtcgtctattcttctgggccctcattctttagtagcatgacgaagttaagatctctggcacgggcccgagtgattggcccagctaatgaaggaagtggcgcttgatgtggaggtgctgctggtgtagtcgtactcatagtgatgtcctcatcagcatgtcatattgtttccaaatgttgttgccacagatgccttccaggactcgcgcacaggacggagccagtacctcccatgggagggaggccacgccgaatccacctccagtccctcccacacttgccgaggctatcgccgccttggtaaacgcgaccgtggataatactcgttttctgagcgagatggcgggtcaacagtttcaacaacaaggcgggcggggttatcaacagggtccccgtgaaacctcttacttgagttctccgagacacgtccactgttgttcgtaaaggcggaagaccccttagaagcgaacgaatgggtccgtgtcatcgagcagaagtttgggcttattcggtgttccgaaatccagaagcccctatttgcggcacagcaattgcgtggacctgccagcacctggtggggaaattttgttgccgtacaaccagctggtcatcaaataacctgggatgagttcaagttagccttcagagaacattatgtgcctaagggagtcctccatctgaagcaggaggaatttatgaagctgaaacaaggaggggatactgttaatcagtatctcaataaattcaatcatttatcccagtacgcaatcgatcaagtgaacaccgatttgaaaaagaagaattgttttatgagaggtttaaatgatcgattgcaaagaaagatggcaacctgcatagatcttacttatggaagagctgtcagtacagcattggcagtagaagcaaagtatgcaggcgccggaaaatccaagggttttggaggtgacaggcctagtcagggcccggtgaaaaggcaacggtttgttatccggccttccaaccagaatcgttgtttctctcgtccaccctccttccttttaagcagccagtatttattcgtccc

SEQ ID NO: 358 - DNA, 1668 bp, Zea mays
  source: /note="Zea mays BAC clone full insert sequence contig bacm.pk147.d02.fis35"
cgtgctgaattgatgttaaaactgcacgaaactactaaagaaaacatagagcgtatgaatgctagatataagtttgctagtgataaaggtagaaaggaaataaattttgaacctggagatttagtttggttgcatttgagaaaggaaaggtttcctgaattacgaaaatctaaattgttgcctcgagccgatggaccgtttaaagtgctagagaaaattaacgacaatgcatataggctagatctgcctgcagactttggggttagccccacatttaacattgcagatttaaagccctacttgggagaggaagttgagcttgagtcgaggacgactcaaatgcaagaaggggagaatgatgaagacatccacactactgatgcatctataccaatacaagtaccaatttctggtcccattactcgcgctcgtgctcgtcaactcaaccatcaggtgattacactcttgagttcatgtccatcatatttagaccatggagacccgtgcactcttgttttgcttaggaatcagggagaagaccgaaagggaaaaggatttgaacatgctggattcggactgcagaagaacaccaacttgtgacggtcaccacggtcagatgcgggctcggattggaatgttcaagcacaacatggaaagcttatcaagtctactttcatatggatccggaattatagtcatatctgttctgaggccgccgtaatcattgttttcttaccgagacatttcctgccttttctgcccatggtgctgcgtcaccctattttggcccaatgggtcgtgtatcaagttaggtccattagggacgcatcctagggttgcagcacgaccccaatacccttgtggtcgtcctcccatgtttataaaccccctagccgccaccaagaacagcgggttttgtttagatcaagtttagctctcgctacttgcttgcaagcgcgcgtgctagttcagccgcccgtcttcttgtcttcggaaccccaccatattgtagtttgatctttaaacctacatttagatctggtaattcagtacttgttctacttgttcttgctagttcttcgattgcttgcaggacgagtgccctagtggccagggtgtcacgctccacaagatcgtgacagccataggaggtggtgtatcggttgctaaggcgcagcgtctttggaaggctgtagtcgggccgtgaacgtcgtctcctcccccaatcgagttattccacaccctctcatcgaaagatcgggcaatcacccaacgggtgcacatcagttggtaatcagagcaaggtttatcggtgagagatttacttttcttcgctgttttcttatctcctatagtccagaaaaagccaaaaaatagtagattagttttaccgcaatcctataaaccattgagcatttactagtactacttagttagggcttgttgagtttttggttgcatcggttgtgtcgagttgctggtcttagtttattcctttagagttttgagttctaccacgttttggtcaccacgaaatccaccatcaccaaaaacatctctggttcgtttttgccaccacggatacatatcatatccgatttggaagtttaaatacaatctggaaagcttatcttatcttctttccaacggatctgaccttatctcaaa

SEQ ID NO: 359 - DNA, 2580 bp, Zea mays
  source: /note="Zea mays BAC clone full insert sequence contig bacm.pk147.d02.fis36"
ctttgtaataaacctggcgctcccatgttgcggcactttttgtaatgcaactattgattttaaatatgtatattttgcttatttgccatgtgtgtgtggatgattcctgaaatatcaaatgtgcattgttcagcttgttgtaatcttaacctcaaaataaaatattcaaatattttttattggtttattgcttgcaacggataaaaatgttgctacaactcgaaactaaacgttgtagcatcctatgataacgagctggtcttgggtggcaccaacacatgtaagtgttgttgtatcttataaaaatatgttgcagtttaccaacgcttatttatatgacttaccaacgtatgtacaagcgttgcagtagcccctagcaacgacagtataggcaacacataattatgcgttggtatagaccctagcaacgcttatataggcttgtaccaacacatatatgcattgctaaagggggtgccattttgtagtgaaacactctcaagtcacgaaccatgcgagacgtaaagaagtcttcgccggccgcgcgggggataggaacgttcttaggccatcgaccctcggtaacctccagcatccgcgccgaagactcccggagctcgggcgaagacatccatccccaggggccacgcatgtccccatcaattccatagcaaaactatcggagacccccagttctcccatcgcagtacctagcttcctcttcttagtggatgggacggcctccggcgcggggtcgtcttcagtctcagccaccggttttttcccgcggcggtcgacaacgtcttgcccgggataaccgccatacggcaaacaattcaactcgaagaccctattcaggcggtcgttagatccacgtatatcccaactccgctgggcctccgtctttggcacgtagcgaccaacaattcgcaccaccccatcctccgcctcacgcacgaatgcggcgggatctcgaccatgcaaatccagtgcgaaggcgggactccacactagcatcccgccacgggaaggcatctggcgagggcatacttcgctcagcgcccagccacgcgccaagggccataccccatacccgacaaactcctcaaccagattgcgtccgctactcatgcgggccgcgcgccgaaaggccccttcgtctccatcctcctccgctacctcaaactgcgggtacgctgagtaataatgcgaacacatgacggccatggggagcccaggatggtcttcgactgtgccttcggcaacgtagaaccaaaattcccaccagttgtcccatttattgcgggcgcagggaaccaactcaacgacttccatcgaagtcttgccggtcttcggcgtaaatgtgcaagatccaaattgagcaatcttatttctgattttccttttctgccaatgcagacaataatacttcgcgaagacttcgaccgagggctgcacgccatacgaagtcgttgccgagacatattttgccagggccaccacggcattcggcgtcagctggtggacctgaacgtcgaatttacgcagaacttctcccataaatcgatgcgcgggcagacgaaggccagcggcgaaaaaagcctcgaagacgaccaactcgccttccggctcggggacctcctctgccctcgggacacgggccactccgtcgccaaaatacccaagctgctgcatgtcttgcacacggaccaaggacatccgcgacacgccgaattccactgtgtcgccggtgcgcaactcctccgccgccacattgctcagcgtctcctcggacgacgccccggtcgacggtgtatcggcagcagaagaggaagaggacggcatggctacgtaccgtcgtcggcggcaggcggtttgcttcacacgggccagatctccgacgagcaagagcaaggagggcagacgagcagcgagcggtttgagaaggaagttagggttttcacggagcgtggaaagataaagttcaaaacgcgctgcccccgcccccttttatacacagggcgtggcgcttcgagaaacccgcaatccaacagtacgacgtcaatcaacggtcatgtcaaaaacccccgcggaaccacttcgagcgagggcagcgtctccaccatctagcgacgtcttcggcaccagatgacttagtcgaactggtccctcggagggcaaatgttggggcgaaggcgaagacgccacccttcgctcgatgccttcgccaacctcgctgcactcacggagacaagacgactggcagacttaccctttgtcccacgcgttgccggacgaagacctgtgatgaggtcgtctcatctcgcggcctcgtccaacatgcaggcccacgtgtgatctggcccattataacaggccctgcgtggccgctgcgcattacgggcctaatttgtaaaggtccccctgtaattacagtctgtaaccatgctttatgggaatattccggggataatctaggcgcctgagggcacatgcgtccttaactcatgacgctgggcactcagatacctataaatacccctgcacagtgcccttgagaggctagattaagagagcttt

SEQ ID NO: 360 - DNA, 3591 bp, Zea mays
  source: /note="Zea mays BAC clone full insert sequence contig bacm.pk147.d02.fis37"
ccgctaacactcactatggggattgggataattacaccgcgaggcgacggatcgtatccttagattagcagctaaagcacgaaaaacagcatttgaggctgctaaaaaggaagcagcagaaaaggaagcagcagaaaaggaggctgctaaattgagagatgcaacagcttctcaacctagtccgaattcccagaataatactgaaggtactcgtagtttacttatttgcaaacttaatatttgtagttctgtgtactgctgttctgaagttcttgtactgattttcataatagatgatttcctttgtaccatatccaatctcatccatgctgaaatcatttgaaaagaatcagtatcactttgtgcttttcatgaaaaaggcttagtatcttttgggttggcacttaattacagaaactttattatgtaattaagcaacatagatggcctgttttgcagatgttggcgtgttgaattggcatttggaccctaagaagtctgaaagcgaggaggaactagcaaaaatccgcagagacagaggatacagttacatggtttgcactacctagtctcccatgaattccaatagctttctgaacctcttatgctgtattctttacatcttgtatatgatatcattacctaaatgtgagttatttctgaaggatcttattgagatatgtcccgacaaactggaaaactatgaggagaaggtgaggaacttcttccgtgagcacatgcacgctgacgaagagatccgctattgcttggagggcagcgggtactttgacgtccgcgacaaagatgacaagtggattcgaattcggataagggaaggagacatgatcatcgtaccagctggaatttatcatcggttcaccctcgacagcgctaaatacacgaaggtaccaacatgatcttaggatcataggagcttcgaatttgatcaactggtgatctctgttgcacaatcatgaatacaactcatgaaatctgtttcatgaactgaggcatgaagacatgattggcattttgtagtggtagcaaaaaaatatatggtactgactccctgaaggccaaataagttcagttggtagaaataattgcagatcaagtgtgtactgtatgtggcaattatgtttttgttttaaattaagaaatttgataggctgtattttttccaaaacattacaaagatcagctattttaattacattccttaattttaagttatgttgtttttacatgtgcagctcatgaggcttttcattggggaaccagtctggaccccattaaaccgccctcaggaggaccacccggcgaggcaagagtatgtcaagaatgtgagtgcgggcactgtatttgctcttgcagctcacttcctggccaacacgaacctaccctccaagcccttctagagaatgtgcaacaaagctccactcctggctggataaacagttattagacctgttgtacctgcgttcttggaaggtgtaatgttgtgtgtggaatgttgtgtgtggaatcagtattagtactagagaaatatatatagggctgcaaatgttgtgtgtggagtcgaactttcatgtttttttttcagactcgctctctgtggtgtgtgcatgtctgtgcgaggtggagtcagatgtgcatgtgtttatacattacagtatgaatcagagcttgtgttgttgccagcaaatataatttccacttgtgttgttgccagcaaatagaaagaagaaatatagcaggtaatattgaatacttgtatgttctgaatactaatgctagcagctaccagtatgtctggagtggactcgcaaataacataactagcagttcaagctagcgacctagaacagaaggaaccagatctacgaaggtttgcatgtgaagtttcaaaaaaaggttatgttgtttgcaagttttcgagggatatatatgttcaaaagttctgcagccaaaagtattaataaaagtattgttatgttaagttcaaagatgacatactttattatcgtaaaatcagtattagtacattcattccagcacacctacctgcgactacatttcaacggggaaagcaacagaacaagacgaggggaaaggaagtccgatccatttcaaacaaaccgacttgagctcttcaccgtaacacaaggggcatatttgtccacacgcgagatcactgcgacccattacctgtagatagctgtgtatgccgggttaagacgagaacaataccaaaactacaaaagatagattgttataataacaggaatctaattggcaccttcgggataccacttttacgaagccgcgagatcgggatacctgagatccaaaatactcgatgatgggggattgaaacgcaagaaactctaacagccgtaatgcgaagcttccaggagtagcggatgcgtacgccagctgcaggtggagagacgcgtttacgcctaccgttgctatatgatcggacgatgaatattaaataagatgacgtggacaacgtgatagagcccgttttaaacccgctttcatatatagacgatttgtgccgggcagggcaggggtacaggaattggagttccacccaagcgctagaggatgtcgtggagttcacgggtgtcgttgacggggtcgaggacatggacaacagggatgacagtaggtcgaacatctcccaccacggcagggggtggactacggccttgtgagtctacgagagagaaggggatgggggtgcagtacgaggcggcgacgatgtgaggatgggagagagaacatagaaggattgacggaggattcggaacaagcgatcagatggacgaccatggtcttttgggagaatcaatttaaaaacattataaaatttattatatttgtaaatatttcataaccaattgaaaaacattataatcaacatttttacatctttgtaattttttagctcggttcgtataaactttgaccatatctccgacttgtgtcctcaatcgagatgtcctagaatcaggttgcatttgtttcgcattgaacttttagacccatgatttttaatacatatagttaaaaattatttttatttatgacccatgatttatcaatgtatggaagttagatttggcaaagctttctttttaattacatctaataagtatttccctccattttacctctgtctccaaaagtatttccctccatttttttactgctaaagcaaatctcacgacgcttcgtaatcatcgtgcagtttccatcttcaactagataacctcaagcgggctcctctcctcttcatcttcctcacccatccgtcaggcgccagccatcccgcgctccagctatcgcgcccagacagccgccatcgtgccagacgatgccggctgccctccaggctccaggtacgccgccgcccgccgggccccctcctccctcctcagtcctccctacgccctacaggacccaggtatgccgtcgcccgtcggccgccagcccccctccagatccagtgaatgtgtgataaactgtttggtatatggagcaactcctatgatcccttggctgctgatgttcataatccca

SEQ ID NO: 361 - DNA, 2267 bp, Zea mays
  VARIATION (1074)..(1074): /replace="c" or "g" or "t"
  misc_feature (1074): /note="Nucleotide given in the sequence has no preference with respect to those in the annotation for said position"
  VARIATION (1200)..(1200): /replace="c" or "g" or "t"
  misc_feature (1200): /note="Nucleotide given in the sequence has no preference with respect to those in the annotation for said position"
  source: /note="Zea mays BAC clone full insert sequence contig bacm.pk147.d02.fis38"
ttgcttctacccaagatgtagaaacaaaagaatgcgtggcacaagtatcaaataatacttttgctaggtaggatttgattggaaacatacctactgccatgttttgagcattctagattgcttcggcctctaggtggttcacctttccacagttgtaagccagaccacgacctcctggtgcttgctgtggtgctccttgtcttgctggggcattgactgttggtgactgctaagctgctttctttggacagttcttcgcccagtggttttgttctccacagtagaagcacgcacggactcctacctgcatggagctacttgactattctagttggttgctggggcaggaaggcgagctgcatggttattctgacgctggtattgatttcctccctgctggttgctctgactgtactgctgctgctgctgaggaaactgcctctggtactggtgctaatgatgacgctgatgctggtgaccttgcatgaattgctggggtgagttgcctgagtagcgggacgactgttactctcgacctgagattcaccgatcttgcgtttcctgtcctccatctcccgacacttccttttagtcatgattgctctatcgatcaagtgctggaaggtggggaaagtgtggttcatcagctggtagtggaggggatcaaccaatcctctcaggaaacggtactgcctcttagcatccgtgttgacatcttctggggcgtaacatgacagctgcagaaacttatccctgtactcactaacggacatgggaccttgcttcagggcgagaaactcctccttcctcactatcatcagtccctcggaaacgtgatagcgacgaaagttgtccctgaattcctcccaggtgatggctttagggttggcatgagtggggaggtaagactcccaccaggactgtgttgctccccttagctgacggggaccatacagaaccttctcgcgattgttgcactaggcagtgtgcaactcgcgctccatagtacacaaccaatcttcagcgtccatggaatcatcagagtgggcaaagacagggggatggcccctcttagattctgcccgcttgtctctgggcacctgtggcatctggacttgcactagaggctaaggtgagggtggctactgctgcacctactgcatcgctgctaaggtctaaccaattgcttggactgcttgagtctgcattaggcacatctgctcaatggtcattgggggtggcgtaggcaattgctgctgagctgcatcttcatggggtgcctgctgttccgactgagcacgccttgcacctctgcgcctgttctcagtcatctgtagaaagcacacacacatcagatctgactctgcagtctttcagcattagaaaagatatacagaaatctccatagcactaaacaaatgatcatcttcactgacaacttctcagataaagaggaaagtggaaataaatggcccctcatgaattctgcccgcttttctctgggcacctgtggcatctggacttgcactagaggctaaggtgagggtggctactgctgcacctactacatcgctgctaaggtctaaccaattgcttggactgcttgggtctgtattaggaacatctgctcaatggtcattgggggtggcggtggcaattgctgctgagctgcatcttcatggggtgcctgctcttccagctgagcacgccttgcacctctgcgcctgttctcagtcatctgtagaaagcacacacacatcagatctgactctgcagtctttcagcattagaaaagatatacggaaatctccatagcactaaacaaatgatcatcttcactgacaacttctcagataaagaggaaactggaaataaatggattacccaactaaataactgactttatgaataactacaccaagttggaggggatacccacaccttgatgacaatcattacaagatccaacttcattacatgttcatcacaacaagcatttgaacatatgataagcaaactaactgataaacccaacgggtagaaagggtgcccgatcttttgatgagagatgatggaggtggaaaacttgttggagaacgacgttggctgcccgactaccacaaccaagatggtgtggcgccttgagcgacaggtacaccgtctcctgataactacgatttggggtggaggtcgacgttgtgctatccgactacaacaaccacaagtgtgttgcgccttagcgatagttacaccggctcctgttgttg

SEQ ID NO: 362 - DNA, 4769 bp, Zea mays
  source: /note="Zea mays BAC clone full insert sequence contig bacm.pk147.d02.fis39"
tagttcggagtagtaatgactagttaagtaagagggtagttcatacacaacacgaaggccatgctataagattgttgccgacatcaccaataacctccatgttgtcgtatggtcgaatcaaaggctcaataggcagtattacaagtctaacacgcaccatccaaaattctctgcctaacttaacacctccaactttatgatttgggtctcgaccaagtactgtgcctaaggcaacagtcttggttggacatctccagctttttaagaacacttgtgctccagtctagtaaacatgctcaagtgtatcagtaaatacttatgtaatgtgggcacaataatggtaagaaaattttgattttaccaatattgactcatctgttggtcggtcacctggagtaccctaatttatggacaaaaatattgaattagtaaagtggatttaagaatatgaatgtacacaaatttttgagtcaccttttgtttcatgcaccataacctataactaatgcatattagtaatgaaaacaattcgatatacttaacaagaaagttgattttcactgtcacctttgatgtggtagcacacttggttttatcaaaggtagttgcagattgcatatctttcctttttacctgtcattacatcacaatgtgtattcaatattttaatatttttggatgattacgaaatagttaattttgtacatattattaacttcaatttagttatgcaacaccctagtgtactgccaattaaaatgcatctccattcaagaatgagtagtatgtgagatactactaattactaatgaacaatgaatacaatacatgggtcatgtgtagaagtacctagttcttagatgcttcttcatttaaggaagtagaagttgcttccttggtcatactctgtatgtgcgagacatcaatgtaaagataatcaatcatgattatgtatgttgaataaatttattgcattcccacctttgatgaattagcgagcttagtattatcgaaggtaatgtctctttccaactcaaattgccttgtttgccaatatattaaattgaaaaatgaatataataaaacatcactttgtagggcgtatatattccatgtattgaaattttgatgtagctgaccttatgggtagtggctagtctatcagttcgttgtaatttaccttgcctagtatcagccaccttaatcttttttaattcaatacatattattaatgtttgcattataccatgaaatctagaaagatgagttatgaggtagcagaggaccttatggatagtagaagtttttctgaatgttggttgcaaatcctcgtactcctttgcctcttgctctctctttatgaaatacagattagtagtttagcaaaaaaatttatagggggtattgagtagcgctactttttgctggggctgtagctatggctgctgctgtacattgtaaaataactatgttgtgttgtagaaaaagccatagcgcagccacaacaatctgaagcgaacaaggcaatgtaatgcaatcatacctgagagtaagttttttcattgtccatcctgaattcttgattttgtggctcaacacatacacgctgatgaaaaataactacaagatgaagtagtaggtactaaaatgtaagaaagtgcggatgtgtaaattccatacagatgcctactttacgttttgaagacgttggaaattgattcgctggaagatcgtccaaacatccctgtcatagcaaataaataaccaaatggattagatgttacacatagacctactgtatgaactgattgtgaaatggagttcaataattttacatgtacactttgatgctgttcgaagagtacactgatgaggacatcagtatgagtacgactacaccagcagcacctcaacatcaagcgccacttccttcattagctgggccaatcactcgggcccgtgccagagatcttaacttcgtcattgtactaaggaatgagggcccagaagaatagacgaccagcccaactgcggcccatagtggacgacctagggttggccgcccctaggggctgcgccccctctctatttaaacgggagctgcgcctcctttgttcttcgagttttgttttacattagctttagctactctcgaacacgcgcaaatctgcgctgtcttcgtgtattcagaactccaccctcgagtaatagattagattgctcgcatctttttcttgttcgttcttcgattgcgcacaggaaacgatcttcgtgatcaggccgatctcgcatcagcaaggtcggtaaccacagggagttggttcagcgattgcattggcgcctcgagcttgctcgtcgtagtcggatcgcaagggtcaacttccgccaaatcggaattatctctactcgccgaaagatcgggcacctcagctacatcaattggtatcagatttccaggttgatcggtgagtttatcgagtgtttttttcctacagtccacaaaaccacataaaaattcaggttagaccttatcccaacacccttttgagcctcgcactttctttcaataatctgcattgttgaatttgtgtgctttcgcgtcatttgttgctggttgcattgtgttcttccaccattcaaaccctagcgccgccaccatctcccctttgatcacgccacaaaccgagtcaacatcgtttccttgtttttctccttcggttacgtcaaaaaaaaacagaaaaaacaaaccgagtcaacggccgtttccttgtttttctccttcggttacgaaaaaaaacagaaaaaaaaacaaaccgagtcaacattgtttccttgtttttctccttcggttacgtcaaaaaaaaacagaaacaaaaaacaacgaaggagaaaggatacagttgtttcatcccggtcgtttgaaaacataacttgaggtacctttcttaaaccgggcataacttttcgctcgggtgtccaaaaaatctgaaatttttacaggagctagttgacaccattctgaggccggccaaactgaccttcggtctgtttgggtttcgataaaattgtcaaaaaaattcaggaaaataaagaaaaaaatccgtcaaagttctcgcacgctctttagagaacttcctgattttctgtagaccacatcagaactctgttttaggtgaaacttcgtgtagctcctattttgttgcttcttgtgctgagaaaaatatcaaaaaaatcatacaaaaaagaaaaacaaaatcacttgtgattcctactagtggcctcgctagtacaatatttacggtactgccattctgctagttccatccgtcctttgcacttgtggccagcaatatagtttcgtgttctgcactataattcaactttgcattattgtttgatcgtgctaatccttgacttgagtgcagcctacccacaactccacatatttctacgacgagcaggtttctgtttctccacgcaatcgctcatccaatctttcaccggttccacctgttgattgcagttcaccactgtggcttggtaagaacggataagaacttgataacagcactagtgtgagcgccttgtgagtagtacacccctgtttttgtcgttggtttttcttcttttggtgtttgcgctaactatggcaggagcacacgacatggtggacgcccagttgcaggaagtaaggggacaagttgatggacttgctgctgacattaggacgatgcatgaacggcttgattcaacgatcacttcgacgaccgagcgtttcaaccaacttgaccttgctcaaacggcgactcgcaccacactcgacaccatccttgcacgccttgatgcattgaccacaaagatggagcaggaatacggcggtgacactgagcaggacgatggagatcgccgtggtcgtgcacgtcgtgtggttcgtcatccccctaatgacttattttctaagattaaatttaaaattccatcttttaatggtaaatatgatcctgctgcatatcttgattgggaattagaggtagaacagaaattttcatgccatgatattcctgctaatagccaagtgaaggctgccattagtgaatttactgattttgctttaatttggtggcgtgagtataaacaaaaacttcccattaacagtgtcattacttggacccaattaaaaactgccatgcgccacagatttgttccttcctattatgctcgtgatttgcttaacaaaatgcagcgttttcaacaaggttcacaatctgttgaggaatattaccaggagttgcaaaagggtatgcttcgttgtggtttggttgagtccgatgacgctgctatggcgcgttttcgtggtggtttgaacagggaaattcaggatatacttgattataaggattattttgatataaccacattgtttgaatatgcttgcaaagctgaacgtgaagtgcagggacgacgatcaaagacatatactaactcttttgcaggccggggtccaacacacagctcaactccgtccagccctgcaccttctacgcctagcactacatcgcgcacagggacgaccaagccagtggcgccccctgccaaaggcgccgcttcttccacaggacgtacacgggatattaagtgccatcgttgcagagggtttgggcacatgattcgggactgcccaaacaagcgtaccttgcttatacgtgacaatggtgagtactcttcagctagtgattctgaggaaactagtcatgctatgattgccacta

SEQ ID NO: 363 - DNA, 4219 bp, Zea mays
  VARIATION (349)..(349): /replace="c" or "g" or "t"
  misc_feature (349): /note="Nucleotide given in the sequence has no preference with respect to those in the annotation for said position"
  source: /note="Zea mays BAC clone full insert sequence contig bacm.pk147.d02.fis40"
cccgtatacactcctactaggggaatgggaaattccaatccgctcgaggtcgacggtatttttcagcttgaggttcgtgattatattgttcgtcatgcttcggggaaaaaactatcagagaaagaagagcaagaggcccagcactacgcccaaaaactgaaatatccaaagggggcgttaatattcaatggcagtggagaagaagacttcttgtattgtcttcccgacagcaaggagatttctgtctgtcgggagatgagcaagagcttcggattcccaactttagaagacgggctctcagtgctgtcgaagaacgatctggccgacagcctggcttataatagcttaaaggtgcgacaaatgaaatccttgtattttttgttgagtccaaaatttttcgtttgtttaaacctattgactcacacatctttgcaggggctgatacttagcaatgccctcagggcacagaaagatgctgaagacgaagggtgttctatagccctgagcaaccttcgttcccgaagtaattgaactgaggaacgaaggtcttgaaaaagataaaatattacattcattgataaataaaataaagcaagacgaagtcgcctttaaaggtcaagctaaggctcagaagcgcgagattgaagatcttcggaaacaactggccagagccaaggaagaacgcatacttgaagaaacgaagcgagaactcagcgaccaatgggcagatcacctagaaggaactgttgaagagcttcgttcgtccaagaagaaatgttataacaaatctatagagtgtgttaagaagttaaaagctagcttcgccagagtcggcacattctcaagcgaagaaaacttcacaagaggcaatcccgaagatcccatcgaatggatcgagcacgaagctgtggccttcgaggaaattttaaatagccgtggagatatatgtgctttctcgggtgccagaggaattgccaccattttagagaaaaagggctgcgaacatgtaaaaattttagcacaatccgaagctgctttgtcctttgaagatgcaagagatccttcggcagaagctagcatggttggtggaaaatttttcactgatatctgggataatggtggccgagaaatggccggagaaattattcaaaaaagtgaaaagggcattcatgatgctagagaggtggctgaggctgctgaaaaaagcgcagagcccgaagggcaaataggtatcaactgatggttttattgtgttgtaattttcgattttaaacttcgttcgcaatttgtaacagcaatgtagccgtatcctgtcctccttcagatcctaccaaagcgtcttcggggcctcccccgaaaggagacgacgaaattaaagagatggctgaagctatcatggatgaagttgttaatcggctcctaaacgaggctgcagaagtcattttgagagaagattaagtattattgtaaaaacctctgaaatgtaatatattgtaacattttgtaaccctgaatgtaatatacctgtttttgttgttcaattctttacgatgcatgaaattttacacgtaccatttttgagtctttgacgaaaaaacaccttcccttcttttcatgcttcgtgaagaagaatttttctttgtcacaacaatatccagtgttctgatgaataatatccaggcttcgtgaagatattttccgaagctacacttccgaagattaataatgtgtctccttttgacatcatgattcttcccttttttcaaaacgtccctctgtagatcgatattgtatccacctcttgtgccatatgcaacatgatgtatgatgcttatgctatgcaaaatgatgcgatgatgttatgttatgtgaggtgatgtttattctgaagatacgtacgcatccctgcaataaaacacaatcttttataagcctcccttaggagcttcttcgccttttacttcagcggaatcagcgtttatttttcactgtaagcctcccttaggagcttcttcgccttttactttcagcggtattcgcgttgacttttcgcgcttcgccttttacttaggcggtatcagcgttgacttttcgctgtatgctctgcattccctttggaacgactttggagcagaaaacttactctgcactccttctggagcggctttttgtgacttcggcaaacttactctgcgttccttagaacgactttttgttgcttcgaagaattttcgatgatgtgaaggttctctttgttatcacaaatctttaaacttcaacaacttaggcctgtgaagaaaatatattttccttgtggcaaaacaacgaaactacttacatgaaatccaaacaatgttctttattacacagaaaataagactgaataagaaagactgctattaaggtaggatatttgtcaatagatgtgctttgactctggcacagtgctgttgactgtacgagcttcggactgctctctgaagtccctttggtgtggagcatactggctcccttctggctgctggccttgttgcagcggaggtgggggcggaggctgttgccaggaagcttggggttgactcaccgaagcaacagaaactgcaggatggttgcccacatattctgggatgtaaggcgaatgatacgaagcagtatgcatgacctgcttcggctgagcttgttgtgctgcggctttggctatttccttttgcttttggatggtaacatggcacatcctggtggtatggcctttgttctcaccgcaaaacaagcaaaagattcttcttggttgatctccgaatcttccgccgaagcccctggcgcctctgcctcttggggctggtggtcggaaggagccttgctgttgccctgaagcttgtgaggaacactgtggcctttgctgttggctccctcgatcatcactttgggtagagttatgaattgatctaacgtgccttggatagaaccttcctccgaagcccctggtcatttcagaaaacctgaaagcctcctcccttctttggcgaaaatcattatcggcccgaatgtactcgtccatcttctggagcagcttctccaaagtttgaggaggcttcctagcgaagtactgagctgacggtcctggccgaagccccttgatcatggcctcaatgacaatttcattgggcaccgttggtgcctgtgccctcaaacgcaagaacctccggacgtacgcctgaaggtattcttcgtgatcctaggtgcactggaatagagcttgagcagtgaccggcttcgtctgaaacccttgaaagctagttaacaacaagtccttcagcttctgccatgaagtaatcgttcctggtcgaagggaggaataccaggtttgagcaacactcctgacagccataacaaaagatttggccatgactgcagcattgccaccatacgaagatactgttgcttcgtagctcatcaaaaactgcttcgggtctgagtggccatcgaatacaggaagctgaggcggcttgtaggacggagggcaaggtgtagcctgcagctcagcggacagaggagaagcatcatcgaaaacaaaattcccatgatggaaattatcataccagccatcttcgttgaggaaaccctcctgatgaaggtcttggtgctgaggccttcggtgctgctcattctgagcaagatgacgaacttcttcagaggcttcgtctatctgcctttgcagttcagctagcctggccatcttttctttcttcctttgcacctgttgatgaagcatctccatgtctctgatttcttgatctatctcgtcctctggtggtgtcgggctgacagccttccttttctggcttcgtgcttcccgaagggagactgtctcctgattgtggtccagcggttgcagagctgcagtcccagtcgctgaagctttcttcggcgccatagcgaaggtttatgatcgccgaaggtgtttaaaaaactcaaagagtggaagtgagttcaccggaggtgggcgccaatgttggtgacttgctctcaaatgctatgagttaagaacaaggcaacatagaaaatgttaatcggcaaaatcctttgtccttcgaagcattattccctttaggatataatggttttcggacgaaggttatgaagggcgtaccttcataaatacattatacaatgacgaaggatgaatcataaggaatataaaggacaacatagacaatta

SEQ ID NO: 364 - DNA, 4913 bp, Zea mays
  VARIATION (202)..(202): /replace="c" or "g" or "t"
  misc_feature (202): /note="Nucleotide given in the sequence has no preference with respect to those in the annotation for said position"
  VARIATION (3070)..(3070): /replace="c" or "g" or "t"
  misc_feature (3070): /note="Nucleotide given in the sequence has no preference with respect to those in the annotation for said position"
  VARIATION (3091)..(3091): /replace="c" or "g" or "t"
  misc_feature (3091): /note="Nucleotide given in the sequence has no preference with respect to those in the annotation for said position"
  VARIATION (4528)..(4528): /replace="c" or "g" or "t"
  misc_feature (4528): /note="Nucleotide given in the sequence has no preference with respect to those in the annotation for said position"
  VARIATION (4566)..(4566): /replace="c" or "g" or "t"
  misc_feature (4566): /note="Nucleotide given in the sequence has no preference with respect to those in the annotation for said position"
  VARIATION (4570)..(4571): /replace="c" or "g" or "t"
  misc_feature (4570)..(4571): /note="Nucleotides given in the sequence have no preference with respect to those in the annotations for said positions"
  VARIATION (4577)..(4578): /replace="c" or "g" or "t"
  misc_feature (4577)..(4578): /note="Nucleotides given in the sequence have no preference with respect to those in the annotations for said positions"
  VARIATION (4619)..(4620): /replace="c" or "g" or "t"
  misc_feature (4619)..(4620): /note="Nucleotides given in the sequence have no preference with respect to those in the annotations for said positions"
  VARIATION (4622)..(4622): /replace="c" or "g" or "t"
  misc_feature (4622): /note="Nucleotide given in the sequence has no preference with respect to those in the annotation for said position"
  source: /note="Zea mays BAC clone full insert sequence contig bacm.pk147.d02.fis41"
ttccatgttgtgcttgaacattccattccgagcccgcatctgaccgtggtgaccgtcacaagtggtgttcttctgcagtccgaatccagcatgttcaaatccttttccctttcggtcttctccctgattcctaagcaaaacaagagtgcacgggtctccatggtctaaatatgatggacatgaactcaagagtgtaatcacatgatggttgagttgacgagcacgagcgcgagtaatgggaccagaaattggtacttgtattggtatagatgcatcagtagtgtggatgtcttcatcaggttccggtggcaaaaactcgtgcttgtatgcaccccgacacccgttttcggaattggtgacgtgcggcaacgaaattgcgccaaaccaccccaaacatgagttttggatctaaagtagtggattgggcatgttcgttgcgcaaaacgaagaaatggttccggtggcgaaaactcgtgctttgtatgcaccgcgacacccattttcggaatgggtgacgtgcagcaacgaaattgcacgaaaccaccccaaacatgagttttggacctaaagtagtggattgggcatgttcgttgcgaaaaacgaagaaatggttacggtggcaaaaactcgtgcttgtatgcaccccgacacccgttttcggaattggtgacgtgcgacaacaaaattgcgcgaaaccaccccaaacatgagttttggacctaaagtagtggattgggcatgtttgttatgaaaaacgaagaaatggttccggtggcgaaaactcatgctttgtatgcaccccaacatccattttcggaatgggtgacgtgcggcaacaaaattgcgcaaaaccaccccaaacatgagttttcgacctacagtagtggattgggcatgttcgttgcgaaaaacgaataaacggttccggtggcaaaaactcgtgcttgtatgcaccccgacacccgttttcggaattggtgacgtgcggcaacgaaattgcgcgaaaccaccccaaacatcagttttggacctaaagtagtggattgggcatgttcattgagcaaaacgaagaaatggttccggtggcgaaaactcgtgctttgtatgcaccccgacacccattttcggaatgggtgacgtgcggcaacgaaattgcacgaaaccaccccaaacatgagttttggacctaaagtagtggattgggcatgttcgttgcgaaaaacgaataaatggtttgggtggcaaaaactcgtgcttgtatgcaccccaacacccgttttcggaattggtgacgtgcggcaacgaaattgcgcgaaaccaccccaaacattagttttggacctaaagtagtggattgggcatgttcgttgcgaaaaacgaagaaatggttccggtggcgaaaactcatgcaccccgacacccattttcggaatgggtgacgtgcggcaacgatatagcgtgaaaccaccccaaacatgagttttggacctaaagtagtggattgggcatgttcgttgcgaaaaacgaggaattggttccggtggcaaaaaactcgtgctttgcatgcaccccgcccgacacccgtttttgtaatgggtgacgtgcggcaacgaaattgcgcgaaaccactccaaacatgagttttggacctaaagtagtggattgggcatgttcgttgcgaaaagcgaaaaaatggttccggtggcgaaaactcatgctttctatgcaccccgacacccgttttcggaatgggtgacgtgcggcaacgaaattgcacgaaaccaccccaaacatgagttttggacctaaagtagtggattgggcatgttcgttgtgaaaaacgaataaatggttctggtggcaaaaactcgtgcttctatgcaccccaacacccgttttcggaattggtgacgtgcggcaatgaaattgcgcgaaaccaccccaaacattagtgtcggggaccataattaggggtaccctcaaggctcctaattctcagctggtaacccccatcagcataaagctgcaaaggcctgatgggtgcgattaagtcagggatcagtccattcgagggactcgatcacgcctcgcccgagcctagccttagacaagggcagccgacctcggaggatctccgtctcgcccgaggcccccctccagcggcgaacgtatttccggctcaggccctgtcttcgccaagaagcaaccctgaccaaatcgccgcaccgaccgaccaaatcgcaggagcatttaatgcaaaggcaacctgacgcctttatcctgacgcgcgcccttcagccgacagagccgaagtgaccgccgtcacttcgccgctccactaaccgtcctgacagaaagacagcgccgcctgcgccgctccgactgcggtgccacttgacagagtgaggctgacaggcagtcaggcccggccgcaggcaccataggaagctccgcttcgcccgacccagggctcggactcgagctaagccccggaagacggcgaactccgctccgcccgacccagggctcggactcgggctaagccccagaagacggcgaactccgctccgccggacccaaggctcggactcgggctaagccccggaagacggcgaactccgctccgcccgacctagggctcggactcgggctaagccccggaagatgtcgaactccgctccgcccgacccagggctcggactcgggctaagccccggaagacggcgaactccactccgcccgacccagggctcggacttgggctcagccctagaagacgacgaactccgctccgcccgaccccagggctcgaactccgccctggcctcagccgacggtctccgcctcgcctgaaccaggggctcggactcgacctcggccacggaagacagactcgaccttggcttcggaggagcttccacatcgcccaacctagggcgcagaccagccacgtcagcaggaggcgccatcatcaccctaccccgagctgactcgggccaaggggaacaagaccggcgtcccatctggctcgctccgcagattgggcaatgatgcggccccgcataatttatggagacagcgctctcagccaccttacggaagcaagaggacgtcagcaaggactcaacagctccgacagctgtccctccgccaggctccatcactcttccgacggccacgacatcacaccagttgggtgccaaaatctctccggctgccacaacggcatgtacttagggcgctagctctcctccgctagacacgtagcactccgctacaccccattgtacacctggatcctctccttacgcctataaaaggaaggaccagggccctcttagagagggttggccgcgaggggacgaggacgagacaggcgctcgtgtgaggccgctcgctccctctcccgcgtggacgcttgtaaccccctactgcaagcgcacccgacctgggcgcgggacgaacacgaaggtcgcgggatttccacctctctcacgcctgtctccggtcgcctcacttccccccttcgcgctcggcctcgcgccgacccatctgggctggggcacgcggcgacatttcactcgtcggcttagggaccccccggtcttgaaatgccgacaattagttttggacctaaagtagtggattgggcatgttcgttgcgaaaaacgaagaaatggttccggtggcgaaaactcatgcaccccgacacccgttttcggaatgggtgacgtgcggcaacgatatagtgtgaaaccaccccaaacatgagttttggacctaaagtagtggattgggcatgttcgttgcgaaaaacgaagaattggttccggcgtagaattttttgggggtagaatttttttcttcttttctctcaccaaattcaggcgttactctttcctttttcccttttcttctcgctaagccttgatcttttctaaaagttatagcgagaattagctcgaaatcttgtgtaaccaaaacctagaactatttttttggttgttgcatcatgccagattatgcactcttgtgtttgtggttgagtgaattggagaattaggcatataagaaaatgtggaaattaaaaaaagaaaagccttttctttttctctctccccccttctccccttttggcccagtcgcccccttcccctggcccaagcggcccagccgccccccctcttcccccccgtgggccgtcctggcggcccagccgcgcgcccctcccccctttgggcccggtcggcccaattgccccctcccctttttcttttttccaaaaatcccctccccgtgggccccgtccgtcatcccctctctcactccctctccctaaccgtcgtcgccgcccctgccctagcactgccgccgcccctccccggcgccgccgccgcgccgtcctccccctccggtgaggcttctcccccccccccccctctcaagaaggcgaatgagtgagttttttcagattcccccccttgcgctccctgttttctttttacacgggggggggggggggggagcagcaatttttttttttttcccccggggaggggggggggatacaaaataaaatatacccccctttttctagggggggggggggggggctacaaacattttggtggcacccacccataatcagtccccgtcgggggggcgggactcaccgttatcccccagtaaggccgggcgatacccgcggccgaatatccgggtgagtgaagagcgcgaggaaaaagcccaggagcccctcggaaattgcccgtggaggggggtctttgccgtaagccccccccccccccgaacgaatgacggcaggacccagagataggttggacaggtgtggcggagcggaggctgtcgtgtagagaggcccggcgcgtgtccccacccccacacagcacgcc

SEQ ID NO: 365 - DNA, 3184 bp, Zea mays
  VARIATION (1856)..(1882): /replace="c" or "g" or "t"
  misc_feature (1856)..(1882): /note="Nucleotides given in the sequence have no preference with respect to those in the annotations for said positions"
  source: /note="Zea mays BAC clone full insert sequence contig bacm.pk147.d02.fis42"
gaaagcaactgcttaaccttaactccacatacagctagtccaatgggacatttgctaagtacgttgatgtgtactcacccttgctttacaaaccaccccaccccaggttgtccccacggtacgcagtgctcaggaggagatgctggcaacatggaggactttgaggagttccaggactacgatgagttctagtttatcttagtggcaaacccccagtcagctgccagtgtaggcttatcttctacgtttcgtatttccacactttgatattaatgttgaaaactatggttatgtattctctgtggatgtcttggacatcttgatgtaaataaagtacctttccgctatttactttgagcattatgtgatgatgtccaattatgtgatcattgtgtatgtgagttctgatcctggcacgtacatggttcgcattcggtttgccttccaaaaccgggtgtgacataagtggtatcaaagccttgctgactgtaggactgctaacctagactaggatggtcaccctaaggactatagacccctactcttaccttgaccttagtgtcctttcaaaagttggtcatctttaccaattctatgttacctacttatctcacaaaattttgtctcacttttctttctatttactttctggtcttatagttgtactctcactcttgtgcttacgatgtcttttgtagatggctcatcttagatgcactgcacgtaagtcagtgatcccctttttgccttctcgcctggcggagcgtccactgcatcgcacggtgccaggtcagtccagtcacctggagatactgcatcatcgcctgcacgaggagcaggagcgccgaagccaggagcaggagcagcaggactcttcccccttgcctcagcaggaggtggagtttgggaggccgcctgcatttgcacctcagccagagatgccccctgcactaccacaggccatcccaactgctgggggagaccctaatggagatggatgcgacgacgacgccggtggcagttcgagccacgacacggagctcttggaggagccagagccggaggggtggatcgctagacccatcactcgtgacgctgctcgcgggtgtcacttccacgacgctctcaacaccttgctgcgtcgggccttcgaccgacacacttggtccatcgagtaccgttgtgtagtctaccagcatcgtcgcgggttatactcggaccagtgggaggctacttgcttggtgcaccatctggacgatgatctctggggtgcagaggccttctcagagcactattctattactgatagggatattgccgaggcagccatgcaaggtgcagcacgacgtgcactttctcagtattactcgttgttcagcggggtagctaatggccttgacctgaagtactaccctcgttgttcgaccgacaatgctggaggtgtgattaacacattggtgagggcaatcctaggctgaacagcatggtcaacctagccaccgtgctcaacaccgagttggaccacgcccttgacgagttgggcaaggttcgtgcagaggttgcggaattgcgtgctgagtgcgtagcatgccactatctggatggtggttctcccgcccctgtcgggattcagcacccttaccgctcaacgccccatggtcgcttcgactatggtaccccagactgcaggacccggatagatttggttccattgatcgaaatagtcggagtctgtaataatgcttaattcagtgtcttagtctagtgagtcttaattagagttagtgatgaggacatcactgccatcaatacaccacaccagcgacctccttcaccatttaatcatggaccagtgaaaaaaaaaaaaaaaaaaaaaaaaaaatatcaggtgaactcgttccttgttgttgaagctaatcattccttaaatgaggtactaataccttgtgattactttattattctaaggtgtttgggaggtgaaccatctagaatttgagaaggcaacaaggcaataaaagctgctccacttgaggggatttcgaaactacaacaagtgcaagtttaagagggcatatctttcagctcccaaggttgtttaatgcaaataagcacttgttggaaaggtccctttgtctactttctagtggatcaagaatcaacgagagatcaaacactaagcgtccagaaactgccgagtgaactcctgctctacccaagtcaatttcgtaactgcagcatgcaccaaattaaatggagcataactttccactcccaaggttgtttagtgcaaataactacttgttggaaagctctcttcgtctactttcatgtgcatcaagaatcaatgacagaaaccaaacgaggcgtccagaaactgctgagagagtttcgttctccattagaactcctttctattcctctatttaagcaactagcagccaccaaagaacttgggtttttgtttgatgtaagtttagcctttgctacttccttgtaaacgcgtgtgtcggctagaccacccggatatttgaaacagaaccccaactctatcagatccgtgagcgtctgctttttatcttgttcttgcttgttctcgattgcttgcaggttcaaggttgttcttggcacggcaagagcagcaacaacaggagtcggtgtaactatcgctaaggcgcaacacccttgtggttgttgtagtcggatagcacaacgtcgacctccaccccaaatcgtagttatcaggagacggtgtatctgtcgctcaaggcgccacaccatcttggttgtggtagtcgggcagccaacgtcgttctccaacaagttttctacctccatcatctctcatcgaaagatcgggcacccttctacccgttgggtttatcaagtggtatcaaatttcaggttgctcggtgagagatctcaatcttccttgttttgtttacctacagtccacttttgcccaaagatatatttagagcagaaattcacctaaaaacagtttgagcctttgctttactacttagttttcgacttgttgaattcacggttgctgcatttgggtcgagttgctggtctaaagttttcttaccgctagagtttcgagttcgcgccaccttatttcaatcaccagtttagacctcttgctgcaattcaaccaaaaagaagagaaagcaaaaggcga

SEQ ID NO: 366 - DNA, 6271 bp, Zea mays
  VARIATION (3651)..(3651): /replace="c" or "g" or "t"
  misc_feature (3651): /note="Nucleotide given in the sequence has no preference with respect to those in the annotation for said position"
  VARIATION (3657)..(3657): /replace="c" or "g" or "t"
  misc_feature (3657): /note="Nucleotide given in the sequence has no preference with respect to those in the annotation for said position"
  VARIATION (3661)..(3661): /replace="c" or "g" or "t"
  misc_feature (3661): /note="Nucleotide given in the sequence has no preference with respect to those in the annotation for said position"
  VARIATION (3666)..(3668): /replace="c" or "g" or "t"
  misc_feature (3666)..(3668): /note="Nucleotides given in the sequence have no preference with respect to those in the annotations for said positions"
  VARIATION (4929)..(4929): /replace="c" or "g" or "t"
  misc_feature (4929): /note="Nucleotide given in the sequence has no preference with respect to those in the annotation for said position"
  VARIATION (5949)..(5949): /replace="c" or "g" or "t"
  misc_feature (5949): /note="Nucleotide given in the sequence has no preference with respect to those in the annotation for said position"
  VARIATION (5971)..(5971): /replace="c" or "g" or "t"
  misc_feature (5971): /note="Nucleotide given in the sequence has no preference with respect to those in the annotation for said position"
  VARIATION (5991)..(5991): /replace="c" or "g" or "t"
  misc_feature (5991): /note="Nucleotide given in the sequence has no preference with respect to those in the annotation for said position"
  source: /note="Zea mays BAC clone full insert sequence contig bacm.pk147.d02.fis43"
ggtttgccttcttgtaacaaaacaccacccaatccaattccactagcatcacattcaagctcaaaagtcttattaaaatcaggaagttggaggagaggtgcatgtgtcaacttatctttcagcacgttgaaagcgtgctcttgtactttgccccaactaaaatgcactcccttcttcgtaagctcattcaaaggtgcagcaatggtgctaaagtccttcacaaaacggcgatagaagccagcaagtcctaggaaactccgcacctgtgtgatagtctttggcataggccatccatgtatcgcttctaccttggcttgatcaacctcaattccctgtggagtcacaacataaccaagaaacgaaactcgatcggtgcaaaatgtgcacttctcaaggttaccaaataaacgtgcatctcgtaaagcattaaaaacagcacgcatgtgatcaacatgttcatccatagatttgctgtagatcaatatgtcatcaaagtatactaccacaaattttccaatgaaggcacgcaaaacctcgttcattaatctcatgaaagtgctaggtgcattagttaacccaaaaggcatgactaaccactcatacaatccgaacttagttttgaaagcagttttccattcatctcccaatttcatacgaatctggtggtacccactacgcaaatcaactttagaaaagacaatggcaccactcaattcatcaagcatatcatctaaacgtggaatagggtgtcgataacgtatcgtgatattattaatagccctacaatcaacacacatacgccatgttccatcttttttaggcactaaaataaccggaacagcacacggactaagagactcacgcacgtaacctttgtcgagtagttcttgcacttgtcgctgaatttcttttgtttcctctggatttgtcctatatggcgcacgattcggcaaagatgcaccaggaataagatcaatttggtgctcaatccctcgtataggtggcagcccctctggtatctcacttggaaatacatcagaatactcctgcaaaatgttagtaataacaggaggcaaagaatgctgcatatcttgaattgaaatcaaagcatccttgcataccaaggcgtaggcaacagtagtggaagcaaataattcattaacatcagtttttgttgcaagcaagcaatgtcctttcaattttatcccatctttgttattaccaacagctttaatattcttgttgttctcagttttagctttggtagctttagcaacatcatcacgcacaatagcctcaggggacatgggaagcaaaataattttcttatcatggtgtatgagagaatatggatttgatcaaccatgatgcatacaatctgaatcaaattgctatggtctacctagcagaatattacaagcatccataggcacaacatcacagtcaacaacatcacgatatgaaccaatagcaaaattaattcgtaccagcttggttaccttgaccttaccactattgttaagccattgaatgtgatatggatgcgggtgcggtttggtcgtaagtgcaagcttctccaccatgtcgctgctagccaagttgttgcagctacctccatcaatgatcaaacgacatgaacgctccttaatgacacactttgtttgaaacaacgtatgtcgctgattctgctctgccttctccatttgtgcactaagcacacgctgtacaatgaggctctcataatgctctgcatcatctgcaccaatctgttcttcgggtggttccttagtgcctgcatcatcagccgcaagcaaagcaagtgtagcttcatccaaatcactagcagaggaatacccaccatcgtcttttaccaccaaaacacgctgattaggacaatcacgctgcacgtgtccatagcccttgcatcgataacacagaacatctcttgttctacccgtggaggctactgaagaggcactacctgctggtttctaggcagatttggttgctgaatttgtggaagatgcacgtggtttgtcgccagaggaaggcgggggtgctggtcgacttggcgagggagttggtgctggtgtacggccggtcatggacgtagtcgtgcgctgttgccatggtgtagattttcctgcagaaacattagaccttgcactagcacgtcgtccctgcacttccctttcagctttgcaagcaagatgaaacaatcgggttacattaacataatctttataagcaaggatgtcctgaatttccctatttaacccgcccaaaaatctagccatagcagattcctcaccctcctctatgttacaacgtagcatacccatttgtaattcctgataatattcttctacacttttagtaccctgtctcaattgttgcaacttgtttaacatatcacgtgcataataagaaggaacaaatctagcccgcatgacccgtttcaatgcatcccaagtttgtggcatgttattaggattcttcttaccatgttctctccaccaaacagaagcaaattcagtaaactcactagtagcagctctaacccgcgcattctcaggaaattcatggcatgcaaacttttgatcaaccgcaatctcccaagtaatgtaagcattagggtcatatttaccatcaaaaggaggtattttaaatttaaccttactaaaagcatcatcattaccatgtgcctcacgtcggcgaaaaccacccatacctctacggttagtacgtagtcgccggcgattaggtgcttcttggtcatcttgttcagtatcagcaacatagtcatcccagttaccttcggcgccctcatcacgcccaccattgatattagcatgcatctcatcaaaccgcctcaagagtgcgacaaggctcttggcaatatgagcaactgtcatttccacatttgcaagtttggtgtttgtgtcgatctgtgtggcctccaattgccccatcttttcattcgtcacctgcatgtcattatcaagaccttccgtgtgcgtcttcaccagccttacaaagtgttgtatgatacccttggtgcgaggagagtgtggcatattacgagaagcatcatcaacctccaatcctgccatggttagacgaacagaggcaacaagaaaaaaaaacgtgaaggaatgaaaactctacaactattaggatgtagctactgcaaggcgctcactctcaacctgcctaatgtagctgaggtacccgatctttgggcgagtagagataattccgatttggcggaagatgacccttgcgatccgactacgacgagcaagcccgaggcgccaatgcaatcgctgaaccaactccctgtggttaccgaccttgctgatgcgagatcagcctgatcacgaagatcgtttcctgtgcgcaatcgaagaacgaacaagaaaaagatgcgagcaatctaatctattactcgagggtggagttctgaatacacgaagacaacgcagatttgcgcgtgttcgagagtagctaaggctaacgtaaaacaaaactcagaaaataaaggagaggcgcagctcctgaataaattagagagggggcgcagcccctaggggcggccaaccctaggtcgtccattatgggccgcaattgggctggtcgtctattcttccagggtcatcgatcttaaaacacatgatgtagttcaattctcttgcacgggcccgagtcactggcccaggtggaaggggtggcgcctgggctggagaaggtgctgctggtgtagatgtgctcgtgttggtgttgatgtccgcatcactgccacacaagctcttaccaattcttaccttgcacaacaggaggggtcagcaaccaacaagtctgcaaccgtggaataagtgtatcggtgccgcagcaacacgacctgtcaaactgtagtcgaaatatgtagagttgtaggtggcctgaagcaaggaatacactagtaccacgttagttacaaaagcaagctgaataatcgttcaacggtggtactgtgctggtcctaggctaaaccaggctagagacgtgagcctaggcacagaggtagtcactgaaaaagaacaactagcacagcacaaagagaaacaacagatttagagattcagcccccttcttcttcttttcctttttttcttttctattcttttttttcttcttcttctgttttttttgcaggggcctaaacccttttttttcactatgacaacccaaacaataaagatattgctaacagcccctttaaatcagatttaacaaatcttgttaatatagaaagtccagaaatctctacgatgattgcggagcgctcagaacgaattttgagatgcggtcagatccgttggaaagaagataagataagctttccaaattgtatttaaacttccaaatcggatatgatatgtatccgtggtggcaaaaacgaaccagagatgtttttggtgatggtggatctcgtggtgaccaaaacgtggtagaactcaaaactctaaaggaataaactaagaccagcaactcgacacaaccgatgcaaccaaaaactcaacaagccctaactaagtagtactagtaaatgctcaatggtttataggattgcggtaaaactaatctactattttttggctttttctggactataggagataagaaaacagcgaagaaaagtaaatctctcaccgataaaccttgctctgattaccaactgatgtgcacccgttgggtgattgcccgatctttcgatgagagggtgtggaataactcgattgggggaggagacgacgttcacggcccgactacagccttccaaagacgctgcgccttagcaaccgatacaccacctcctatggctgtcacgatcttgtggagcgtgacaccctggccactagggcactcgtcctgcaagcaatcgaagaactagcagaacaagtagaccaagtactgaattaccagatctaaatgtaggtttaaaaatcaaactccaatatggtgggttccgaagacaagaagacgggcggctgaactagcacgcgcgcttgcaagcaagtagcgagagctaaacttgatctaaacaaaacccgctgttcttggtggcggctagggagtttataaacatgggaggacgaccacaagggtattggggtcgtgctgcaaccctaggatgcgtccctaatggacctaacttgatatacgacccattgggccaaaatagggtgacgcagcaccatgggcagaaaaggcaggaaatgtctcggtaagaaaacaatgattacggcggcctcagaacagatatgactataattccggatccatatgaaagtagacttgataagctttccatgttgtgcttgaacattccaatccgagcccgcatctgaccgtggtgaccgtcacaagttggtgttcttctgcagtccgaatccagcatgttcaaatccttttccctttcggtcttctccctgattcctaagcaaaacaagagtgcacgggtctccatggtctaaatatgatggacatgaactcaagagtgtaatcacctgatggttgagttgacgagcacgagcgcgagtaatgggaccagaaattggtacttgtattggtatagatgcatcagtagtgtggatgtcttcatcatggagactgttctccggacggcgcaccaagcaggtcgcctcccagcggtccgggtagaccccgcgactatgctggtagaccacacagcaatactcgatggaccaagtacgccggttaagtgcccgacgtagtagggtgtcgagcgcatcgtggaagtgacacccgcgagcagcgtcgcgagtgatgggtcgagcaatccatccttccggctcctggtcagtagagaagtcggtgtcgtggctcgagctgtcgtcgccacctccgtcgtctgggtctcctcccgcagctactccagaggctggagcacccagtggtggtgcagggagcgcctccagggaagcacaagggagctgctcctcacggactctatctcctggtggagcgagaaagagagccctgctgctcctgtcgtcgacgttcctgctcctcatgcaggcggtggtgcagtctctccaagtggctggactgtcccgccacgggacggcaaaacggagcctcaccaaggcggagggtaaaaagggatgacggacttttctgcagggggctaaattcaaccgtctcacaaaaacaccgcaggaaaagatggggaacggattattttggccacaggttatggccccaaata

SEQ ID NO: 367 - DNA, 4471 bp, Zea mays
  VARIATION (1945)..(1945): /replace="c" or "g" or "t"
  misc_feature (1945): /note="Nucleotide given in the sequence has no preference with respect to those in the annotation for said position"
  VARIATION (4239)..(4239): /replace="c" or "g" or "t"
  misc_feature (4239): /note="Nucleotide given in the sequence has no preference with respect to those in the annotation for said position"
  VARIATION (4312)..(4312): /replace="c" or "g" or "t"
  misc_feature (4312): /note="Nucleotide given in the sequence has no preference with respect to those in the annotation for said position"
  VARIATION (4329)..(4329): /replace="c" or "g" or "t"
  misc_feature (4329): /note="Nucleotide given in the sequence has no preference with respect to those in the annotation for said position"
  source: /note="Zea mays BAC clone full insert sequence contig bacm.pk147.d02.fis44"
gggcggattccaattgcgtggcgacggatcgtaaccttaacgtgagatcattcttcacatagaaccattctgtcatccagtctccgggccatctcttccgaaaggttggcacggggcagcttgacccggaccgagaaacgaaactgtagcagccaaaattattgtgatactgttccttaccccaaggttttgtttcatatgataattcatgtatattgcagaagctttttgcgtcaggcttcagaccttggcttctcacggcccacacgaagatattcaaccttataattgcctcgggggtaagttgatgaagatagatttcaaacattttcagcacctctacaacgaagctgctcaaaggaaatcgcagcccagctttcaaaaagcttcggtacactacgacttcattctcttcagggtgtggacaagtcttctccccttcgtcgaccctcactacggacaaatcccggaaataccttcctctcatgttgacaagatgattctctttgatagttgatttaccataaactgaatggcttggtcgccagggacgatcttcggagtcttcaccaccgctgtccacatcataactgtcgctgtcaccagtatcctcagacaaaccttctagaatctccttggtgattttttctgtgttggtcttcgacattgctataagaaaccccagatttttctcttcatcgagactcagtttcatctcggtaacagccttcttatcttcagacatcttcggagacactgaaaaactgttttcaaagccgaagcttcaaaactaagaactcagcaaatcttagtgcacaagagctaaaaattgagtgagcgggagcagatagccagagagcgtgccaaatgagtttgcggtatgaccgtatttatacgcccagtgcgttggaaattgaaagaccccgcttgtcagtgaatgttgctattctagcaaagggaaggtgttttttcagaccttcggcgtaaagccttcgtccatgtcgcaatctaaatttattattttaaacaaattaatattgcgaggggctactgttgggggccttcggcttccgaaggtcctcaaaaacaggatttaacagtatttctggagtatagtgtgtgaacaggtatcttcggactcaagtcagcatcacagcagaccagaataatacgaaggttgatacagcgccgaaggtgtgagcaggaaagcttcggcgtggcagcaaaaaatgaaaccgacttaaagatgaaaaggctattcagacctcgatagattactatagaattattatcaaatgtaaagggcataaatgtaattttgtatgggctgtgtcctgtgtctataaataggtgaacagtacccccgtactgttcacgctgattgggcattcgcttttgcgtcacgcttgtactttcatctccttcaagttgaaggtacatttgtaatcgaacgttatttctgtttatacatgatagtaatatataattgtctatgttgtcctttatattccttatgattcatccttcgtcattgtataatgtatttatgaaggtacgcccttcataaccttcgtccgaaaaccattatatcctaaagggaataatgcttcgaaggatgaaggattttgccgattaacattttctatgttgccttgttcttaactcatagcatttgagagcaagtcaccaacacactccgtccccaccgccggggtacatcgtgagcttcgtctccttccacgagcggggatttggtgtgccagcgagccgctttatgcgggcgatcctgcaccattacggggtggagttgcacaacctcagccccaactccatctcgcaggccgccatcttcgtagcggtgtgcgaggggtacttggggatcgccccccactgggatttgtggacccatctctttttcgtggagcttttcgcttcgccgacgggagagagaaaggtccgtgcggcagtgcgggccagcggctgcatccctcagctgaagcagtcgcgggccgtcgctgtatattcccgcccattcctccgcgtcctcgaacaaggggtggcaccgccggtggttctacctccggaatgaaggcgagttgctcccgccgttctcatagcgagtagtcactgtcgccgccgatgcttggcgctaagggaccccgcacgaaagacagaagaacctcgaaccccttctcaaggccttggaggcgttgcggaaggggggactcaccgccgcgggagtgattgccgccatctaccgtcggagggtgcttcccttggcggagcgacggttgccgctttgggagatgacaccggaggttgacttggagggctcgcggatgtcctcggatccccttcccttcgacgtcctccacgggcgggtggccgtcgcgttggggaaaccggaccccagcgccttctcccagcctttgatgcgccctgaccaagggcgcgtgactctggtgagtgtccactccttccttcctcttgtatcgggttgcccctggtttttacggtcgggatttccatccatcttcaggaggtagggtggcacaagccttccctgccacgggtcccgcaggatgcggtggaccgagcagcgcggcgggttgccgcggaggagaagaagaaaaagaaggacgcggagaaggcccgggcccgcgagcggatgcgggctcaagacgccttggaaaagctctgtcgtcggcaggagagggaggggctcccaagggagccgtcgccggaaacgcctgatgacaacgacgatgatgaagatgatgacgagggagacgacatggctgcccgccttggtctcagccctggcttgaggctaggtcaggagctgtcaagccagcccccgagcgggctgatgccgtcagtccccggagtcgggacgccggggtcccggcccgaagagcgggggcagtctgagagggtgatgtagctgaggtgcccgatctttcggcgagtagagataattccgatttggcggaagatgacccttgcgatccgactacgacgagcaagcctgaggcgccaatgcaatcgctgaaccaactccctatggttaccgaccttgctgatgcgagatcggcctgatcacgaagatcgtttcctgtgcgcaatcgaagaacgaacaagaaaaagatgcgagcaatctaatctattactcgagggtggagttctgaatacacgaagacagcgcagatttgcgcgtgttcgagagtagctaaggctaacgtaaaacaaaactcaaaaataaaggaggcgcagctcctggataaatagagggggcgcagcccctaggggcggccaaacctaggtcgtccactatgggccgcagttgggctggtcgtctattcttctgggccctcattcttcagtagcatgacaaagttaagatctctggcatgggcccgagtgattggcccagctaatgaaggaagtggcgcttgatgtggaggtgctgctggtgtagtcgtactcatagtgatgtcctcatcatcctccccttcttgaagtgaagtcgtcctcgacgacaactcctcatcctcggccatatatggtttcaaatctgcaacattaaaactagtggaaacaccaaattccgcaggcaggtcaaggatataagcattatcattaatctttgttagcaccttaaaaggaccagcagcacgaggcattaatttagaacggcgtaaagtaggaaaccaatcctttctcaagtgcaaccaaaccatatcacctggctcaaaagtaacatgttttcttcctttactaccagcaacctgattttttgcattagtagcagcaatgttctgtttcgtttgttcatgtatggtaatcatttgttcaacatgtgcagcagcatctacatgtggggtgttcgcagcattaagtgaaatcaaatcaataggtgccctagggatgtaaccataaacaatctggaaagggcacatctttgtagaagaatgcgtggcatgattgtaagcaaattcaacatgaggcaagcaatcctcccaacgtctcaaattcttgtctaaaacagccctaagcatggtagataaagttctatttactacctcagtttgtccatcagtctgagggtgacaagtagtgctaaacaacaatttagttcccaatttattccaaagagatctccaaaaatggcttagaaacttagcatcgcgatcagagactattgttttttggaatacatgtaaacgaataatttctctaaagaacatttcagcacatgctagcatcatcagtttatgacaggtataagtgagcattttagagatctatcacaaccacaaatactatccatcactctaggcagcaaaacaagtcataggatatcagccaggaaaaagggcagcaaggcatatcaacatgcttgtcaacggactactttcgaagtagtgactgcaaagcgctaaatagcggatcgagcaaagatgcagcacac

SEQ ID NO: 368 - DNA, 4186 bp, Zea mays
  VARIATION (4133)..(4133): /replace="c" or "g" or "t"
  misc_feature (4133): /note="Nucleotide given in the sequence has no preference with respect to those in the annotation for said position"
  source: /note="Zea mays BAC clone full insert sequence contig bacm.pk147.d02.fis45"
acgccatggtccatcttttttaggcactaaaataaccggaacagcacacggactaagagactcacgcacgtaacctttgtcgagtagttcttgcacttgtcgctgaatttcttttgtttcctctggatttgtcctatatggcgcacgattcggcaaagatgcaccaggaataagatcaatttggtgctcaatccctcgtataggtggcagcccctctggtatctcacttggaaatacatcagaatactcctgcaaaatgttagtaataacaggaggcaaagaatgctgcatatcttgaattgaaatcaaagcatccttgcataccaaggcgtaggcaacagtagtggaagcaaataattcattaacatcagtttttgttgcaagcaagcaatgtcctttcaattttatcccatctttgttattaccaacagctttaatattcttgttgttctcagttttagctttggtagctttagcaacatcatcacgcacaatagcctcaggggacatgggaagcaaaataattttcttatcatggtgtatgagagaatattgatttgatctaccatgatgcatacaatctgaatcaaattgccatggtctacctagcagaatattacaagcatccataggcacaacatcacagtcaacaacatcacgatatgaaccaatagcaaaattaattcgtaccaacttggttaccttgaccttaccactattgttgagccattgaatgtgatatggatgtgggtgcggtttggtcgtaagtgcaagcttctccaccatgtcgctgctagccaagttgttgcagctacctccatcaatgatcaaacgacatgaacgctccttaatgacacactttgtttgaaacaatgtatgtcgctgattctgctctgccttctccatttgtgcactaagcacacgctgtacaatgaggctctcataatgctctgcatcatctgcaccaatctgttcttcgggtggttccttagtgcctgcatcatcagccgcaagcaaagcaagtgtagcttcatccaaatcactagcagaagaatacccaccatcgtcttttaccaccaaaacacgctgattaggacaatcacgctgcacgtgtccatagcccttgcatcgataacacagaacatctcttgttctacccgtggaggctactgaagaggcactacctgctggtttctgggcagatttggttgctgaatttgtggaagatgcacgtggtttgtcgccggaggaaggcgggggtgctggtcgacttggcgagggagttggtgctagtgtacgaccggtcatggacgtagtcgtgcgctgttgccatggtgtagattttcctgcagaaacattagaccttgcactagcacgtcgtccctgcacttccctttcagctttgcaagcaagatgaaacaatcgggttacattagcataatctttataagcaaggatgtcctgaatttccctatttaacccgcccaaaaatctagccatagcagattcctcaccctcctctatgttacaacgcagcatacccatttgtaattcctgataatattcttctacacttttagtaccctgtctcaattgttgcaacttgtttaacatatcacgtgcataataagaaggaagaaatctagcccgcatgacccgtttcaacgcatcccaagtttgtggcatgttattaggattcttcttaccatgttctatccaccaaacagaagcaaattcagtaaactcactagtagcagctctaacccgcgcattctcaggaaattcatggcatgcaaacttttgatcaaccgcaatctcccaagtaatgtaagcatcagggtcatatttaccatcaaaaggaggtattttaaatttaaccttactaaaagcatcatcattaccatgtacctcacgtcggcgaaaaccactcatacctctacggttagtacgtagtcgccggcgattaggtgcttcttggtcatcttgttcagtatcagcaacatagtcatcccagttacctccggcgccctcatcacgcccaccattgatattagcatgcatctcatcaaaccgcctcaagagtgcgacaaggctcttgtcaatatgagcaactgtcatttccacatttgcaagtttggtgttcgtgtcgatctgtgtggcctccaattgccccatcttttcattcgtcacctgcatgtcattatcaagaccttccgtgtgcgtcttcactagccttacaaagtgttgtatgatacccttggtgcgaggagagtgtggcatattacgagaagcatcatcaacctccaatcctgccatggttagacgaacagaggcaacaagaaaaaaaaaacgtgaaggaataaaaactctacaactattaggatgtagctactgcaaggcgctcactctcaacctgccacacaagctcttaccaattcttaccttgcacaacaggaggggtcagcaaccaacaagtctgcaaccgtggaataagtgtatcggtgccgcagcaacacgacctgtcaaactgtagtcgaaatatgtagagttgtaggtgggctgaagcaaggaatacactagtaccacgttagttacaaaagcaagctgaataatcgttcaacggtggtactgtgctggtcctaggctaaaccaggctagagacgtgagcctaggcacaaaggtagtcactgaaaaagaacaactagcacagcacaaagagaaacaacagatttagagattcagcccccttcttcttcttttccttttttttttcttttctattcttttttttttcttcttcttctgtttttttttgcaggggcctaaaccctttttttcactatgacaacccaaacaataaagatattgctaacaacccctttaaatcagatttaacaaatcttgttaatataggaagtccagaaatctctacgatgattgcggagcgctcagaatgaattttgagataaggtcagatccgttggaaagaagataagataagctttccagattgtatttaaacttccaaatcggatatgatatgtatccgtggtggcaaaaacgaaccagagatgtttttggtgatggtggatctcgtggtgaccaaaacgtggtagaactcaaaactctaaaggaataaactaagaccagcaactcgacacaaccgatgcaaccaaaaactcaacaagccctaactaagtagtactagtaaatgctcaatggtttataggattgcggtaaaactaatctactttttttggctttttctggactataggagataagaaaacagcgaagaaaagtaaatctctcaccgataaaccttgctctgattaccaactgatgtgcacccgttgggtgattgcccgatctttcgatgatgagagggtgtggaataactcgattgggggaggagacgacgttcacggcccgactacagccttccaaagacgctgcgccttagcaaccgatacaccacctcctatggctgtcacgatcttgtggagcgtgacaccctggccactagggcactcgtcctgcaagcaatcgaagaactagcaagaacaagtagaacaagtactgaattaccagatctaaatgtaggtttaaagatcaaactacaatatggtggggttccgaagacaagaagacgggcggctgaactagcacgcgcgcttgcaagcaagtagcgagagctaaacttgatctaaacaaaacccgctgttcttggtggcggctagggggtttataaacatgggaggacgaccacaagggtattggggtcgtgctgcaaccctaggatgcgtccctaatggacctaacttgatacacgacccattgggccaaaatagggtgacgcagcaccatgggcagaaaaggcaggaaatgtctcggtaagaaaacaacttcgggcgcagcatgctgacgccgtccgggaaaagtcgaccgcggacagcaagtgccgcaagctggcggagaaggtggccgccctggagggcgagaggacggacctccggcgccagctggtggaggagaggagggaggctaaccaggccatcgccaaggcgcatgcggaggccaatttggcgcgggtggagggtagtctcgccaaccagcgcgccgaggaatgggaagtgcggttcaacgctctgcaggcccgcatggagagggccgaggcctctacgtg

SEQ ID NO: 369 - DNA, 8935 bp, Zea mays
  source: /note="Zea mays BAC clone full insert sequence contig bacm.pk147.d02.fis46"
gaggatcgtacccttagatgggtctgtttttcgaaactcaaaaccaggagatccaaatatcaaagttgtgccaaatttacttgaacacgtcctggaaaagtttgaactcaaaccaaattcatttgacacggttttggcgcagtttgacctcgggaccagacattctgacactggcaccttggtgacgctacaactccctgtccctagcctaaaaccgcacgacgtccatacacaaaagacaatgcaaggtcaggtgaacaaatccttcacagcgatcttgcccaaattcacgaagatttgcacccaatcagcgctagaacttgggcagaggcaacgggcacacgtgttcgaccgtggctgacacctccggttcacgcccgttcgcgcaccggcgcctcccagtgcacgcccgcgcgcgctcgccggtccacggccgcccgtgcaccgcgtcgtgcctataaagccgccccaagcctcggccattcatccccgcgtgctctcacatcttgcccaagtcagtgatcaccggaaattgccccgagcacgccgcgccaccgcctgccaagctttcagagcctcggccgccgtggccagctctctccagtcgcgtccaagttgcgccagcgcttcggttagctccgctattggcccgtgaagctttccaagccctcggacctggccgaacttcaccggaagctcgagatcaccctcgccggacttcggtcggccgcccccgcacgtggactgggcactccggtgagccattcttcaattcctcgcgcacaccccttccttgatccctggtgaagctctctgacccgtttgatcggtcaattgtgcccaggataggccggactcctcgccgccgacgagctcccccgcctgcgtacgcggaccggccgactccgaccatccccgacggcgacccgcacatcgtcgtgaccctcaggacctcccctacaccctctgccacctcaccggagcaatctcgccgccggtaagcccctccgccctttcttccgccgcgggtactgtttaatttggggaaaggacctcgggttaggattagaagaatccagggggttttctgagatgtcagtgactcaattgaatagtagcccagggactagtctgtaaggaaaacttaaaacacccgccagggaccccgttgcaaagtagttttccatttaatcatttctgtttaatctttttaataaacagagaactttagaaattcataacttgatgaatacttaaccaaaagttgtcaaaccaattttgctaaattctaaatattatgaactatcaattaaaaatactgaaccctatgttttctgttcaaatttttagagtttaaaatttaatacagaaactgaccaaactttgtttaattaaggaaaatttgttatgcttctgtgctgaacctaagaaaatttgtagatgttcaaaccccatttaagcactgtttaaaaatagtgagaaccccagtattgaaaaatttagtgtagaaatccattaaaagccatttctgcccaaatcttaggaaaatcagaaaggccttagaaattaatgaccaatggatgaaattattttttctagtttgcttaagtgacaaagaacctaggaaaaataaaggaacctctagtccagatcagattcaaagtaaaatgttttatttagcattattccaactagaaatcaattattagaattacaaaactaggcccaaaattgataataaaaatccagtggacttgtaaccaccagaaccccactgcaaaaataatggacaccccaacccatcattttaagtagggtaatcattttaagtagggtaaataaatataacatgataatgagccatagttcaattaaatcatgaatagcccaaaataatgcaataatgggcaaataaaattttgctagatcaataatgagataggccaccagagaaaaatacaaacccattggaaagatgcaaaataatatctattgccaatattttataagaaaggccatttaatcctattaatgcataccacccattcccttaagcaaaaagatgccaaacttcagaatgattgctcttgcgcaaaatagaagctaggaaaaatcagaaatctgttgtttgatatttttcaaatatagtggtagtagaaagcacccctttggctagaaactttagaaaatcctagtaaaataactaataagtattaatggctagaaatttgtaccaagtcatgttatagcatctaaatgccagcaaaaataagtcctagagaagtacctactattaaatgatagttgtagttcaaatcaccccttctaccctaaaatttggtaattttgtccagagaaaactattcactttttgaaccccaaattttgagataaagaattatacaccagtaataagccactgtaatttttacagaagttttggaaatttattaaggcaacttgtagttcaaacccactccaaaaacttaaagagaataaagaaaaggaaaggagaaataaatctcactccaataagtccaacttgaattcttggcaattctcactaaagaccttaaaaagaattcaatggaaccgcaaaaataaacctaccatttaacttagctaaggttgatccaatttaccaagtataccacccaaaagtctcacataagtaaggtttaactccatctaactcaagtagatcatacaacatcaaaagtttaaattactaaagcacatatcatatcatgcttatatcttacgcattgcattcattagattgtaatctcaccgacggagagtacgtgttcatccccgagcaagggactgtccaagaggaagaccagaagcaagctcccgaggctgctatcgaggatctccctgcagccccagctattgaaggcaagccccgatttatatgcataaccgtattattatatgctactttactacacttaatgcttgtaggattgtaatgtgcacttaagtgtaggagttgcttgaaacctctagttgcatgaacttaagattcctttttgagatgaatactactatgctaggtcgagtagctgcttgctaatcaggatctcggtagaagtcgagtgatttttctagcactcgcgcgaggtcaggaattgattgtattcatcttgataacgggatctatgttagtctatggacttggatccagggaggatgccttgaccatgagacgggaaaaaagaattaaggattaatgtgtggatacttgagtcaagcgtttgaacgtactaaccacatgtcgggaaaaatggtaaccgataaacctagtacctgagtgaagccaggcgcgaactttatccctcatgcgacctgagactgggtctcccatgctagctatggtgggtacaagtgcggtcactgcacggcggcagccggggtcagtggagcattgtatgccaaggcggtgaggcctggacgcgaacggggaatcgatggggacggttgacatgtgtggggtcggagtaccctgacatgtcgtgtgtttaggtttaccttgcaaggataaaactcgattcgaatcgtctgcttctcgcagctaatgagactgcttgaccccttatactacatcgagtaagaagtgaaatgaggttacatgagacaatttgttgattgaactaaatgcttgttaccatgtatgcttagaaggagcaaacctagctaaaataatgatactagaatttgaaaagctaagaattgattttagaaacagctagtgcttttggcaaatcaaacccctcagccaaacagctgcatagtctagaggtagaggagtagactcctcataccaggtaagtctagctgagtattagtagttccgtcacagctggtatcggagcgaagcccttctctgcagatattatgaggcatcttcaaaaggattttctaaagacttatctaaaaaatctttttccttcttacctaagtattctgaagagtttatttcaaagaccaggtagtaagagtgcaacatatagaaggtgtgaatcaactaaggttgattctgtaattatacatgcatcatgctaagaactatactaatcaaagtttcccccttagaaaaatgtcgccgcgcacgaggagaactgcgcgcaaacatactggaccgattggtgtgccgtgtcaccagctggccccaagacatgataatagtagtagtggaagaaacgatccgataggggatctcgaagcagaagtaagtcggctccaagcggaactccgccgcaggacggatatatgggtcgcagatggcgaccgaataaatgagttgagaagagacgtccgccatctgcgagattagctcgcggaccgagatttggcactcgactgggttgttcaatctcgttcgcttgcatgggccaaggaggaaacagctcaagctcgagtagccgagctcaacttggccgttgataacctgcagacatattgcaataccttacatgaagaagttcatgtattatattcgcaactgcatcctagtgaacctgcggatcctgtcgagtcggaagccggaccctcgcatgttgcgggagaagtgcttggtggtgagttggacctttttaggccccctccttctatgaggctggtcaatgaatggtctcccacacccgacgacaagactgccaagagcaaccggaagcaggaatagtggtgtagtagtagaaatagaagtagtgtattgtataataggttgtactattgtataataggtagtgctatggtataataggtagtgtatcctgttgtaaaaaattcgagtctgtaacattactctttttggtaatgtaaaatggatggttttttctttggcatgtgatgtagctgaggtgcccgatctttcggcgagtagagataattccgatttggcggaagatgacccttgcgatccgactacgacgagcaagcccgaggcgccaatgcaatcgctgaaccaactccctgtggttaccgaccttgctgatgcgagatcggcctgatcacgaagatcgtttcctgtgcgcaatcgaagaacgaacaagaacaagatgcgagcaatctaatctattactcgagggtggagttctgaatacacgaagacagcgcagatttgcgcgtgttcgagagtagctaaggctaacgtaaaacaaaactcgaaaataaaggagacgcagctcctggataaatagagggggcgcagcccctaggggcggccaaccctaggtcgtccactatgggccgcagttgggctggtcgtctattcttctgggccctcattctttagtagcatgacgaagttaagatctctggcacgggcccgagtgattggcccagctaatgaaggaagtggcgcttgatgtggaggtgctgctggtgtagtcgtactcatagtgatgtcctcatcatcctccccttcttgaagtgaagtcgtcctcgacgacaactcctcatcctcggccatatatggtttcaaatctgcaacattaaaactagtggaaacaccaaattccacaggcaggtcaaggatataagcattatcattaatctttgttagcaccttaaaaggaccagcagcacgaggcattaatttagaacgacgcaaagtaggaaaccgatcctttctcaagtgcaaccaaaccatatcacctggctcaaaagtaacatgttttcttcctttactaccagcaacctgatttttagcattagtagcagcaatgttctgtttcgtttgttcatgtatggtaatcatttgttcaacatgtgcagcagaaaacaaagtccatagagatatcaagccaaggagaagaagggacaggcaaaggcatatacaaaccatggttgttcaaccgtgacttagctttctgacaagtagtgcagcgtgcaacaaggcgctccacatcagcgcgcatccgaggccaaaagaaatgggcagccaacacctcatgcgttttgtagacgccaaaatgccccatgagaccgcctccatgcgcttcctgtaacaacaaaagacgaaccgagctagctggaacacacagcttgttagcgcgaaacaggaacccatcctgtatgtgaaatttgccccatggtatcccattaatacaatggccgaaagcatctttaaaatcagcatcgtcaacatattgatccttcacagtgtccaaaccaaagattttaaaatctaattgtgacagcatggtatagcgacgagacaaagcatcaacaataacattgtccttcccgttcttgtgtttaataatgtaaggaaaggactcaatgaattcgacccatttagcatgacgacggttcagatttgtttgggtacgaatatgttttaaagcctcatgatcagaatgaattatgaactcacgatgccaaagatagtgctgccaagtatgcaaagtgcgcactaaagcgtaaagctccttatcataagtagaatatttcagactagcaccgcttattttttcactaaaataagcaactggttttccttcttgtaacaaaacagcacctagcccaataccgctagcatcgcattcaagctcaaaaacattattaaaatcaggcaattgcaagaggggagcttgggttaacttatctttcaaagtgctgaacgctaccacctgcgaatcactccaagcaaacgacacatctttctttgtaagctcatgtagaggcgctgcaatggagctaaaatcacgaacaaatctgcggtagaaaccggcaagtccaagaaagctccgaatttgtgtgaccgtcgtcggtgtaggccactcccgaatggcagcaatcttgctgctatccacctcaatgccctgcggagtaaccacataaccaagaaacgagacacgttgcgtgcaaaatgtgcacttttccatgttaccaaacaagcgagcagcacgcaaagcataaaaaacagcacgcaaatgtgctaaatgctcctctatagacttgctgtaaataagtatatcatcgaaataaacaacaacaaacaaacctatgaaggcccgtagaacttcgttcattaaacgcataaaggtgctgggagcattagtcaatccaaatagcataaccaaccattcatataaaccaaatttcgttttaaaagccgttttccattcatcaccgagtttcattctaatctgatggtaaccgctacgcaaatcaaccttagagaaaataacgacaccactaagctcatctaacatatcatcaaggcgtggaataggatatcgataacgaactgtgatgttattaatagcacgacaatctacgcacatacgccatgacccatctttctttggaacgagtaaaacaggaaccgagcaagggctaagagactcatgaatgtaacccttatcaagcagcgtctgcacctggcgctggatctccttcgtctcctctggatttgtacggtacggggcgcggttcggaagagaagcgccggggatgagatcgatctgatgctcaatgccacggaggggaggaagacccggtggtatgtccataggataaacatcagcatactcctgcaaaaggttaacaacagcagggggtatatccaaagacggtgcatcatcaagcggaacaagcatgcacgagcatactagtgcataacagggcatatgagcttcatggagatcatcaaaatcagcacgtgtagcaagtaaaataggagagtgcaacttgatttcagatttaataggtgcggctgatgtcgatttgacttgttgtgcagttttagcagccctagtaagatcatctttcaaaatttggtcaggggtcattggatgtataattattttctggcctttaaacatgaaagaataatgatttgaacgaccatgatgtaaactatcagtatcatattgccaaggtcgacctaataacaaagagcatgcttccataggaataacatcgcaatcagcataatcagaataagaacccagcgaaaaggggtaccgaacgtgttacctttattttaccaccatcattaagccattgaatatgatacggatgtggatgtgtgcgagtggactaggataatttctctaccaacgttgtacttgccaaattgttgcagctgccactatcgatgatgatgcgaatcgaccgttcgtgcacgacgcccttggtatggaatagagtgtgtcgctgatttttttcggcctgggcaacctgtgtgctgagaacacgctgcacaacaagactctcatacctatcggcgtcgatgggatcaacgtggacttcctcattttctgcatggttagtggcaatcatagcatgactagtttcctcagaatcactggttgaagagtactcaccattgtcacgtataagcaaggtacgcttgtttgggcagtcccgaatcatgtgcccaaaccctctgcaacgatggcactgaatatcccgtgtacgtcctgtggaagaagcggcgcctttggcagggggcgccactggcttggtcgtccctgtgcgcgatgtagtgctaggcgtagaaggtgcagggctggaaggagttgagctatgtgttggaccccggcctgcaaaagagttagtatatgtctttgatcgtcgtccctgcacttcacgttcagctttgcaagcatattcaaacaatgtggttatatcaaaataatccttataatcaagtatatcctgaatttccctgttcaaaccaccacgaaaacgcgccatagcagcgtcatccgactcaaccaaaccacaacgaagcatacccttttgtaactcctggtaatattcgtcaacagatagtgaaccttgttgaaaacgctgcattttgttaagcaaatcacgagcataataggaaggaacaaatctgtggcgctcttgctgaaagatcccgtcgacctcgcgcgaggttgaatcgcgcacttcgcccgataggagtcgtttcgcc

SEQ ID NO: 370 - DNA, 8592 bp, Zea mays
  VARIATION (557)..(557): /replace="c" or "g" or "t"
  misc_feature (557): /note="Nucleotide given in the sequence has no preference with respect to those in the annotation for said position"
  VARIATION (8536)..(8536): /replace="c" or "g" or "t"
  misc_feature (8536): /note="Nucleotide given in the sequence has no preference with respect to those in the annotation for said position"
  source: /note="Zea mays BAC clone full insert sequence contig bacm.pk147.d02.fis47"
ctaatttgaatggatggatgtatgtatgcttgcaatcgcatagagaacgatccggttgaagagcccgaggaactcgcaggagaagcccctgagcagcagtcggttggtggaggcaagtgtcccttgacctatctctgtcctattcattctttaattcacctctcactttacacatttatgcctaaggattaactagctttgttatccatgtccttgtttacctatttgggttggattattattgtttagcttcatgctattgcttaactctaatcaatgaacatgatgagattatctatgatacgttgttttcccctctgttattatgatgttatacttgtggtcttcaagggggcttgagcggtttctcgagtgcctctccgtaaggacttgttctatggatgaccgcccgggaaaacagtgcaaccatgagggtggaatggggtgcccttagctgaataattagaggatccggggtgtagttcgcttagccatcgtgccgtcaatggggctcggtgtatgcggctcactctgccaagtttgggttcgccccttgaggaggagtgcggtgcatttaggaaacctaacgggtggctacagccccggggaatctttgtaaaggctacgtagtgatgccctaccagaccacctaggtagtggtcaatggggagtagctctctccgggcagaaagggatcacgacttgtgggtaaagtgcacaacctctgcagagtgtttgaaaactgatatatcagccgtgctcgcggttatgagcggcaagggagctctagtgattagtggtacttgatcagagacactttggtttacaggtggcaatgagactgatgggtttggaaagggtacatcgggctaataacttgggataatgctaaaacctggctttctattagtaaataataatctgaccaactaaaagcaactgcttgacttatccccacataaagctagtccactacagccaaataggatacttgctgagtatgttgatgtgtactcactcttgctctacacaccaaacccccccccatccccaggttgtcagcattgcaaccactgctcaggagaagatgaagccgtggaaggtgatgtagctgaggtgcccgatctttcggcgagtagagataattccgatttggcggaagatgacccttgcgatccgactacgacgagcaagcccgaggcgccaatgcaatcgctaaaccaactccctatggttaccgaccttgctgatgcgagatcggcctgatcacgaagatcgtttcctgtgcgcaatcgaagaacgaacaagaaaaagatgcgagcaatctaatctattactcgagggtggagttctgaatacacgaagacagcgcagatttgcgcgtgttcgagagtagctaaggctaacgtaaaacaaaactcaagaaataaaggaggcgcagctcctggataaatagagagggggcgcagcccctaggggcggccaaccctaggtcgtccattatgggccgcagttgggctggtcgtctattcttccgggccttcgttctttaacagcatgatgtagttcaattctcttgcacgggcccgagtcactggcccaggtggaaggagtggcgcctggactggggaagatggtgcctgggctggagaaggtgctgctggtgtagatgtgctcgtgttggtgttgatgtcctcatcatcctccccttcttgaactgaagtcgtcctcgacggcaactcctcgccttctcccgcatacggtttcaaatctgcaacattaaaactagtggaaacaccaaactccgcaggcaggtcaagggtataagcattatcattaatcttggttagtatcttaaaaggaccagcagcacgaggcatcaatttagaacgacgtaaagtaggaaaacgatcctttctcaaatgcaaccaaaccatatcaccaggttcaaaagtaactagtttccggcctttactaccagtaatctgatatttagcattagcagcagcaatgttttgttgagtttgttcatggagattaatcatttgttcaacatgtgcaagagcatctatgtgtggggcatccgcagcatcaagcgaaaacaaagcaataggcgccctaggaatgtaaccataaacaatttgaaaagggcacatctttgtagaagaatgggttgcatgattataagcaaactcaacatgaggcaagcaatcctcccaacgtttcaaatttttgtctaaaacagccctaagcatggtagacaaagttcgattaactacctcagtttgaccatcagtctgagggtgacaagtggtgctaaacagcaatttagttcccaatttattccacagagatctccaaaaatgactcagaaacttagcatcacgatccgagactattgtattgggaataccgtgcaaacgaataatctctctaaaaaacaattcagcaacattgctagcatcatcagtcttatgacaaggtatgaaatgagccattttggagatcgatcaacaccacaaaatgctatccctccccttcttagttctaggcaatcccaaaacaaaatccatcgaaatatcaatccaaggggaagtaggaacaggcaaaggcatatacaaaccatggttgttcaaccgtgacttagctttctgacaagtagtgcagcgtgcaacaaggcgctcaacatcagcgcgcatccgaggccaaaagaagtgggcagccaacacctcatgtgtcttgtagacgccaaagtgccccatgagaccgcctccatgtgcttcctgtaacaacaaaagacgaaccgagctagctgaaacacacaacttgttagcgcaaaacaggaacccatcctgtatgtgaaatttgccccatggtttcccattaatacaatggccgaaagcatctttaaaatcagcatcatcaacatattgatctttcacagtgtgcaaaccaaagattttaaaatctaactgtgacagcatggtatagcgacgagacaaagcatcagcaataacattgtccttcccattcttgtgtttaataatgtaaggaaaggactcaatgaattctacccatttagcatgacgacggttcagatttgtttgcgtacgaatatgttttaaagcctcatgatcataatggattataaactcacgatgccaaagatagtgctgccatgtatgcaaagtgcgcactaaagcgtaaagctccttatcataagtagaatatttcagactagcatcgcttaatttttcactaaaataagtaactggttttccttcttgtaacaaaacagcacctgcaataggggagcttgggttaacttatctttcaaaaatatttcagactagcatcgcttaatttttcactaaaatatttcagactagcatcgcttaatttttcactagaatatttcaagctcaaacactttattaaaatcaggcaattgcaataggggagcttgggttaacttatctttcaaagtgctgaatgcttcctcctgggaatcactccaagcaaatggcacatatttctttgtaagctcatgtagaggcgctgcaatggagctaaaatcacgaacaaatctgcggtagaaaccggcaagtccaagaaagctccgaatttgtgtgaccgtcgtcggtgtaggccactcccgaatggcagcaatcttgctgctatccacctcaatgccctgtggagtaacaacataaccaagaaacgagacacgtcgtgtacaaaagatgcatttttccatgttagcaaataactgggcagcacgcaatgcatcaaaaacagcacttaaatgttccaaatgctctttcttagatttgctgtaaataagaatatcatcaaaataaacaaccacaaacaatcctatgaagggccttagaacttcattcatcactcgcataaaagtgctgggagcattagtcaatccaaacggcataaccaaccattcatataaaccaaatttcgttttaaaagccgttttccattcatcacccagtttcattctaatctggtggtaaccactacgcaaatcaatcttagtgaaaataatggcaccactaagctcatctagcatatcatcaaggcgtggtataggatatcgataacgaatagtgatgttattaatagcacgacagtctacacacatacgccatgacccatctttcttgggaacaagtaacacaggaacggagcaagggctaagagactcacgaatgtatcccttgtcaagcaacgcctgtacctggcgctgaatctccttcgtctcatccggatttgtacggtacggtgcgcggttcggaagctgtgcgccgggaatgaggtcgatctggtgctcaatgccacgaagtggtgggagacccggtggtaagtctttgggaaagacatcagcatactcctgcaaaaggttagcaaccatagggggaatagccaaagatggtgcatcatcaagtgaaatgaggacactagagcatataagtgcatagcatggcaaatgagcaccgtgtagatcatcaaaatcagcacgtgtagcaagtaaaacaggagccttcaacttgatttcagaaggaacagagggcgatggatctagttgtttagcagttatagcagctcgggcaagatcatctttaacaatttgttcaggtgtcattggatgtataattattttctgacccttaaaaatgaaagaataatgattcgaacgaccatgatgcaagctatcagtatcatattgccaaggtcgaccaagtaacaaagagcatgcttccatgggaataacatcacaatcaacaaaatcagaataagcacccatggagaaaggaacgcgcacggaacgcgtgatttttattttaccaccatcattgagccattgaatgtgatatgggtttggatgcttacgagtgggtaacgataacttttcgaccagcatggtactcgccaaattgttgcaactgccgctgtcgataatgatgcgaattgaccgctcctgcacaacaccctttgtatggaacagagtgtgtcgctgattcttctcgggcaaagcaacctgtgtactaagaacacgctgcacaacaagactttcatacctatcagcgtcgcccgggttgacatgtacctccgcctgagctgcatggttagtggcaagtagtgcatgttcaatttcttcagaatcactagcggaagagtactcaccatcgtcacgaatgagcaaagtgcgcttgtttgggcagtctcgaatcacatggccaaatcctctacagcgatgacactgaatatcccgtgtacgacctgtgggtggggcagtgctggctggtttggtcatcttctcgcgtggagtagtggtggacgtggatggcgcagggggaactggtgctgaggtggatgtcgagcttcgtcctgcaaaagggttagaatatgtcttcgagcggcgtccctgcacttcacgttcaactttgcaagcatattcaaataaagtagtcatatcataatattccttataatcaagtatatcctggatttcgcggtttaaaccaccacgaaaacgtgccatagcagcatcgttgtcctccaatatcccacaaccaatcatacctttttgtaattcctggaaatagtcctcaacagattgagaaccttgctgaaaacgctgcattttattaagcaaatcacgagcataatacgaaggcacaaatcgatgtcgcatcgcagctttcaactgatcccaagtggttggaatggcagtggtatgtttcattttatactcacgccaccaaattaaagcaaaatctgtaaattcacttatagcagctttaacctgagaatgtgcagcaatatcatggcatgaaaatttttgttcaacctctaactcccaatcaagatatgcagcaggatcatatttgccattaaaaggtggaattttaaatttaatcttagaaaataagtcattagggggatgacgaaccacacggcgtgcacgaccacgtcgatctccatcgtcctgctcagtgtcactgccgtagtcctgctccatctttgtggtcaatgcatcaaggcgtgccaggatggtgtcgagtgtggtgcgagtcgccgtttgagcaaggtcaagctggttgaaacgctcggtcgtcgaagtgaccgttgaatcaagccgttcatgcatcgtcctaatgtcagcagcaagtccatcaacttgtccccttacttcctgcaactgggcatctaccatgtcgtgtgctcctgccatagttagcgcaaacaccaaaacaccaaaaggagaaaaaaaccaacgacaaaaacaggggtgtactgctcacaaggcgctcacactagtgctgttatcaagttcttatccgttcttaccaagccacagtggtgaactgtaagcaacaggtggaaccggtgaaagattggatgagcgattgcgtggagaaacagaaacctgctcgtcgtagaaatatgtggagttgtgagtaggctgcactcaagtcaaggattagcacgatcaaacaataatgcaaagttgaattatagtgcaaaacacgaaactatattgctggccacaggtgcaaaggatggatggaactagcagaatggcagtaccgtaaatcttgtactagtgatgccaaaaaggcactagtagaaatcacaggtgattttgtttttcttttttgtatgatttttttgatatttttctcagcacaagaagcaacaagataggagctacacgaagtttcacctaaaacagatatcagatgtggtctacagaaaatcaggaagttctctgaaaagcgtgcgagaactttgacggatttttttctttattttcctgaattttttgacaattttgtcgaacccaaacagaccgaaggtgagtttggccggcctcagaatggtgtcaactagctcctgtaaaaatttcagattttttggacacccgagcgaaaagttatgcccggtttaaggaaggtacctcaagttatgttttcaaacgaccgggatgaaacaaccgtatcctttctccttcgttgttttttgtttctgttttttttttgacgtaaccgaaggagaaaaacaaggaaacgatgttgactcggtttgttttttttctgtttttttttcgtaaccgaaggagaaaaacaaggaaacggccgttgactcggtttgttttttctgttttttttacgtaaccgaaggagaaaaacaaggaaacgatgttgactcggtttgtggcgtgatcaaagggtagatggtggcggcgctagggtttgaatggtggaagaacacaatgcaaccagcaacaaatgacgcgaaagcacacaaattcaacaatgcagattattgaaagaaagtgtgaggctcaatagggtgctgggataagatctaacctgaatttttatgtggttttgtggactgtaggaaaaaaaacgctcgataaactcaccgatcaacctggaactctgataccaattgatgtagctgaggtgcccgatctttcggcgagtagagataattccgatttggcggaagatgacccttgcgatccgactacgacgagcaagcccgaggcgccaatgcaatcgctgaaccaactccctgtggttaccgaccttgctgatgcgagatcggcctgatcacgaagatcgtttcctgtgcgcaatcgaagaacgaacaagaaaaagatgcgagcaatctaatctattactcgagggtggagttctgaatacacgaagacagcgcagatttgcgcgtgttcgagagtagctaaggctaacgtaaaacaaaactcaagaaataaaggaggcgtagctcctggataaatagagagggggcgcagcccctaggggcggccaaccctaggtcgtccattatgggccgtagttgggctggtcgtctattcttccgggccttcgttctttaacagcatgatgtagttcaattctcttgcacgggcccgagtcactggcccaggtggaaggagtggcgcctggactggggaagatggtgcctgggctggagaaggtgctgctggtgtagatgtgctcgtgttggtgttgatgtcctcatcagaaggagacttccaggagttccaagactacgacgagttctaggcgtgggttagcggcaacccccagtcggctgcctgtgaaggccgcgtttatctacgtttcttttccacactttgatttattgtaaggaccatatggacgtctcagacgtatgatgtaatcgactattatttccctttttaatactatttgagcattgtatgatgatgtccatgttatgtaactgctgtgtacgtgaattactgatcctggcacgtacatggttcgcattcggtttgccttctaaaaccgggtgtgagataagtggtatcaaagccaggctgactgtaggaccgctaacctaaaatagaatggtcgttctaaggactatagacctttgtccctgccttgactttgatatcccttcaaaagtggtcatacagaccaaacctattgtctactatattttataccttgctgaaaatcatgttttattctaatccttcatttatttatggtcattacttggtggtcatat

SEQ ID NO: 371 - DNA, 6439 bp, Zea mays
  source: /note="Zea mays BAC clone full insert sequence contig bacm.pk147.d02.fis48"
gaggaagttgagcttgagtcgaggacgactcaaatgcaagaaggggagaatgatgaagacatccacactactgatacatctatgccaatacaagtaccaatttctggtcccattactcgcgctcgtgctcgtcaactcaaccatcaggtgattacactcttgagttcatgttcatcttatttagaccatggagacccgtgcactcttgttttgcttaggaaccagggagaagaccgaaagggaaaaggatttgaacatgctggattcggactgcagaagaacaccaacttgtgacggtcaccacggtcagatgcgggctcggattggaatgttcaagcacaacatggaaagcttatcaaatctactttcatatggatccggaattatagtcatatctgttctgaggccgccgtaatcattgttttcttaccgagatattttctgccttttctgcccatggtgctgcgtcaccctattttggaccaatgggtcgtgtatcaagttaggtccattagggacgcatcctagggttgcagcacgaccccaatacccttgtggtcgtcctcccatgtttatagaccccctagccgccaccaagaacagcgggttttgtttagatcaagtttagctctcgctacttgcttgcaagcgtgcgtgctagttcagccgcccgtcttcttgtcttcggaaccccaccatattggagtttgactttgaaacctacatttagatctggtaattcagtacttgttctacttgttcttgctagttcttcgattgcttgcaggacgagtgccctagtggccagggtgtcacgctccacaagatcgtgacagccataggaggtggtgtatcggttgctaaggcgcagcgtctttggaaggctgtagtcgggccgtgaacgttgtctcctcccccaatcgagttattccacaccctctcatcgaaagatcgggcaatcacccaacgggtgcacatcataggagtccctcggctcagtcggccttgccacttacatgcacccgcgttcgctccttggggtcctgcttccgacatagccggggaacgcaaaagccttttcgattgaaaattttgacgcagaggggttcccccctttttagctcccgagggagggtcgggttctgccaaggcaaggccgacccttccttgacgactaaaacttgtgtgggggcaaggtaagcgaacaacttgaaggcatcttaagggtagaagcaacgtagctgttagacgtttggagtgttggtgcagacctcaccttcactgtcggccagttcatttgttctgggcttcagaactttggcgataacaagcggcccttcccaggggtgggtgtagcccccgggtgtctccaacaagggctcggggtgctgcgcgatggtcacgatcttctccgggttggcttcgatgccccgcttggagacgatgaaccccaagagcatgcctcggggcaccccgaagacacacttttcaggattgagcttgacgcctttcgcctctttgatgaaccctgccgccattagcttgtggatctcctcgcctatggctctgcgcctttcttcgtcgaatcggcgcagaggctgcttgacgggtcgggctccggctcggatgtccagcgagtgctcggtgacgtccctcggtatgccgggcatgtccgagggactccacgcgaagacgtcggcgttcacgcggagaaagtcgaggagcattgtttcctatttgggaccgagctcggagccgatccggatctgcttggaggcgtcgctgctggggtcgagggggacggccttaaccgtctccgctggctcaaagttgccggcatgacgcttcacatctggcacctccttagagaggctctccaggtcggcgatgagggcctcggactcggcgagggccttggcgtactccacgcactccacgtcgcattcgaacgcgtgtttgtacgtggggccgacggtgatgaccccgttggggcccggcatcttgagcttcaggtaggtgtagttggggacgaccatgaacttcgcgtagcatggtcttcccagtaccgcgtggtaggttcctcggaacccgaccacctcgaatgtcagggtctcccttcagaagttggagggtgttccgaagcagacgggaaggtcgagttgtccgaggggctggacgcgtttcccaggaatgatcccatggaagggcgcaacgcctgcccggacggaggacagatcgacacgcaggagcccgagggtctcggcgtagatgatgtcgaggctgctgcctccgtccatgaggaccttggtgagtctgacgtcgccgatgatggggtcgacgacgagcgggtatttccccgggctcggcacatggtcggggtggtcggcttggtcgaaggtgatgggcttgtcggacccgtataggtagactgccgccgccaccttcaccgcacagacctcccggcgctcttgcttgcggtgccgagccgaggcgttcgccgcttgcccaccgtagatcatgaagcagtcgcggacctcggggaactctcctgcctggtgatcttcctttttgtcgtcgtcgcgggccctgccaccctccgcgggtggcccggccctatggaagtggcgccgaagcatgacgcactcctcaagggtgtgcttgacgggcccctggtgataggggcacggctccttgagcatcttgtcgaagaggttggcacctccggggggtttccgagggttcttgtactcggcggcggcgacaaggtccgcgtcggcggcgtcgcgtttcgcttgcgacttcttcttgcccttcttcttggcgccacgctgagttgacgcctcgggggcatcttccgatgggcggccctggggctgcttgtccttccggaagatagcctcgaccgcctcgtggccggaggcgaacttggtggcgatgtccatcagctcgctcgccctggtggggtcttgcgacccagcttgctcaccaggtcgcggcaggtggtgccagcgaggaacgcgccgatgacatccgagtcggtgatgttgggcggctcggtgcgctgcttcgagaatcgctggatgtagtcccggagagactctcccggctgctgtcggcagcttcggaggtcccaggaattcccggggcgcacgtacgtgccctggaagttgccggcgaaagcttggactaggtcgtcccagttggagatctgccccggaggcaggtgctccaaccaggcgcgggcggtgtcggagagaaagaaggggaggttgcggatgatgaggttgtcatcgtccgttccacccagttggcaggccagacggtagtccgctagccacagttccggtctcgtctcccccgagtactttgtgatagttgtcgggggtcggaaccgggtcgggaacggcgcccgtcgtatggcccggctgaaggcctgcggaccgggtggttcgggcgagggactccgatcctccccgctgtcgtagcgtcccccacgcctggggtggtagcctcggcgcaccctctcgtcgaggtgggcccgacggtcgcggtgatgttgctcgttgccgaggcgacccggggccgcaggcgctgtgttgcgcgtgcgcccggtgtagatcgaggcttcccgcatgaattgggaagtcgcgacatgaggttccgaggggtacccctgccttcgggaggtagagctctcggcccgtcggaccgcggcgccttccaggagattcttgagctctccctggattcgccgccccttggtggttgatggctccggcatcgcgcggaggagcattgctgctgcagccaggttctggccaaccccactagatgcgggtggcggcctgaccctgacatcgtcggcgatgcggtgctggaagccctggggtagatgacgtatttttctggccggaggttgggccgcccatgcctgtccgacgtcccggcggatcggctcaagcgctcctgctccctcgtcgagcctggcctgcaccccgcggatttgctcgagctgtgggtcatggccccccgcctgaacggggaccacagctagctcccgtgggatgtcaacgcgaggcaccgacctaggagatcaccgtcctccagcatgccgagatggttgccttcggagggaccccctagatcgacgtggaaacatttgcggcttgggccgcagtcctcgtcgccgaggctacggctaccgtcggaacagtcggaagggcagtagtcgcatgcggtcatgaagtcccgcatggcactggggttgccaagtccagagaaatcccaacagaagctgggctcgtcgtcttcctcggacccagagggcccgtaggtcgagacgtccgtcagccggtcccaaggtgaccgcatacgaaaccccagagggtttggactcgcctctacgagagcgcccaccaaagcgaagccgctaggcgggtcgaggctgaatccgaaagtcgtgggatgggaatcggtcggtacctcttggtcgacgggcggtgatgaagtcaagtcggggactgactgcaccgtcgtctcaggtacgagggtgacgtccagcaagcctttcgcgagcgcgctggcgtcgtccgtctgcccggaatcggcgcgttgcggggagacggcgctcgtcttcgtctcaagcgcgaggtcgatgcccggtgcgccccccgttggggtgctggtgctatcgactcgctcgacagccgacgaggcgccgcctcctgcttggccttggttgccccgccttcccctccgtcggcggggaagagggcggggtgagctcgatggttgttcttccaccacgcggggaagacgtcgtcgattccgccgccggcgggcaggctgtcggccgccattgtcgctgtcgcccggcggtggaatgagtatcatgtcgtagctgccgtcgagggacatgtactcaagactcccgaaacggagcaccgtcccgggttggagaggttgctggagactgcccatctgaagcttgacatgaagctgttcgtcaacacgcagcaggcccctacctggcgcgccaactatcggcttttcgagaccgggggatccctaagccgacgagtgaaatgtcgccgcatgccccagcctagatgggtcggcgcgaggctgagcgcgaaggggggaagtgaggcggccggagacaggcgtgagagaggtggaaatcctgcggccttcgtgttcgtcccgcgcccaggtcaggtgcgcttgcagtagggggttacaagcgtccacgcgggagagggagcgaggggcctcacgcgagcgcctgtctcgtcctcgtccccgcgcggccaaccctctctaagagggccctggtccttccttttataggcgtaaggagaggatccaggtgtacaatgggggtgtagcggagtgctacgtgtctagcggaggagacctagcgccctaagtacatgccgttgtggcagccggagagattttggcacccagctggtgtgatgtcgtggccgtcggaggagtgctggagcctggcaaagggacagctgtcggagctgttgagtccttgctgacgtcctcttgcttccgtaagggggctgagagccgccgtcgtcacagagtatgcggggcgccatcattgcccatctggcggagcgagccagatgggacgccggtcttgttccccgtggcccgagtcagctcggggtagggtgatgatggcgccacctgctagacgtggctggtctgtgccctaggttgggcgatgtggaagctcctccgaagccgaggtcgagtctgtcttccgtggccgaggtcgagtccgagcccctggttcgggcgaggcggagaccgtcggctgaggctagggcggagtccgaccctggggtcgggcggagcggagttcgtcgtcttctggggctgagtccaagtccgagccctgggtcgggcggagcggagttcgccgtcttctagggcttagcccgagtccgagccctgggtcgggcggagcggagttcgccgtcttccggggcttagcccgagtccgagccctgggtcgggcggagcggagttcgccgtcttccggggcttagcccgagtccgagccctgggtcgggcggagcggagttcgccgtcttccgaggcttagcccgagtccgagccctaggtcgggcggagcggagttcgccgtcttccggggcttagaccgagtccgagccctgggtcaggcgaagcggagcttcctatggtgcctgcggtcgagcctgactgcctgtcagcctcactctgtcaggtggcaccgcagtcggagcggcgcaggcggcgctgtctttctgtcaggccggtcagtggagcggcgaagtgacggcggtcacttcggctctgtcggctgaagggcgcgtgtcaggataaaggcgtcaggctgcctttgcattaaatgctcctgcgatttggtcggtcggtg

SEQ ID NO: 372 - DNA, 10941 bp, Zea mays
  source: /note="Zea mays BAC clone full insert sequence contig bacm.pk147.d02.fis49"
gcacgaagtagtatggaggacctgcttcggctgaccctgccgcgcctcggcttcagcaatttccttttgcttctggattgtaacctggcacgaccatgttgtgtggcccttgtccttgccacagaagaggtagtacaatttcctgggttgattgctgaaccttcctccattgaagcttcttcctcctctgcctctcggagctagtggtctgtaaggagtttgctgcatgctcgaagactgtgagatatgatggctgctttgagcattattggccctttcatcgttagcattggagttatggattgacctgacatgcctgggatgaagtcttcctccgaagcccctggtcatttcagaaaacatgtatgcttcctcccttctttggcggaaatcattatcagcttggatgtactcatccatcttctgaagaatcttctccagggtttgtgggggcttcctcgcaaaatattgggctgtaggtcctggccaaagccccttgatcttggcctcaatgacaatttcattgggcactgtaggcgcttgtgctctcaaacgcagaaaccttcaaacatacgccttaaggtactcctcgtggtcttgcatgcattgaaacaaagcctgagcagtgactagcttcatctgaaaaccttggaagctagtgactagcatgtccttgagcttctgcaatgatgtgattgttcctggccaaagggaggaatactaggtctgggccacgcttctgattgacaaaggactttgccatgatagcagcgttgcccccatacgaggatattgttgccttgtaactcatcagaaattgctttggatccaagtgcccatcatacatgggcaactgtggtggcttgtagaattgtggccatggggtagcctgcaattctgctgccagaggagaaacatcaccaaaagtaaagttaccatgatgaaagtcatcgtagtaccattcatctttgttgaatgagctctcctgacgtagctccgtgtgttgaggccttcgatcctggtcatcttgagtaagatgatgcatctcctcaatggcttcgtcaatcttcttctgaatatcagccaggcgaagcatcttctcctttttcctttgcacttgttgatggattgcttctaaatccctgatttcctagtcaagctgctcctcctgaagagttgggctggtagcctttctcttttggctcctggcctatcgcagggagaggcgtcctgatttgtgtccagtggctgaagggcagcctctggcatcgttgccttcttcggcagcatgtcgaaggttgatgcttgccgaaggttgtggaagtgagttcaccagaggtgggcaccaatgttggtcacttgttctcaaattctgtgagctaagaacaaggcaacacaattgttaattgttaaggaccttcgtccctcaaagcattatctccttactggtataatgcttcttggacgaaggtcaagaaggacacaccttcataatattaatacaagggtaagaatgcgaagaaatgaatatgatagtcatattatactaattcatttattccttcattcataaaacatatatgaatataaataatgttaattttacattgatacctttgacttgcttgaatgcgagaatgcgagagagtgaatacaatccagcgtgaacagtacggtgctactgttcatctatttataggcaaaggacgcagaccgggcaaaagtacatttatgtccttaaggtttacacatgatcataatacaaattataaaggactaagtagtcttttcttcgttcggctgttatcaatatccttctgctttattgtgagctgaagcttttccgtctggcaatagcttcggcgtttgctcttatcttctttgaatccatcttcatcttctagagacgaagcttcctataatagcttatgctaaaaacaagtagttaattatgtttttgaggaccttcgaaaggacaagtcccccaacaatatccctagaggtatgaaggcagaagtcattattgcatttgtggaaatttacattgatatgttattattgagattctcctctttgtgatttgggaactaggtgtttggtacattgtattcttgctgttctctaatatttaagaagggacttgtgaactccgtggttggtaaaacattgtagttacgtgtaacaccctgaatttgggggtataaaatttctttctatttatcaaccaaattcaggtgttactcttctctctctctctctagtttctctctctccttttctttttgtagaattagcttgattagtaagggattatttatttgattttgtcaaaaccatatgagtcatgaaatgttgcatcatgttgagctccaaatattctttgaattgttgcacatgtttgacttaatttgaatttgaaacttggtttgaatttgaattgaaaaccctagataaaataaatagaaaagacattagaaattccctgaaatagaaaaggcaaatgtggcccagttagcccaagtcggcccagctggtgcgcgcgcccgagcgccagcccgcgctgataggcggaccccgcctgtcggcctgtctcacccgcgcgctctctcccctctctccctcccgctgcccagtgagccagtcttgtcggcaccgttcctctcgcacgcggccactctctctccgctctctctctctgtcccgcgaaccccaccggtcagtccgtccccaacctcccgcccacgtccctcgcagtggacgcgcccatgaccgcgcgttctctggccacctccgcacgtcctcgcccctttttgagccccgcgccccgctcactcacttgccccagctcacttgcgccctcaactgaaccccatcgccccctctctcaccctgcgcacgcgaccagacaagctctgtcgccgctcaccgaagaccgccgcagttccgcgagcgtcgttgagtccccatcacgttcgtggcctcggtaagcaccgccgcatcacccgcaacttgggacatccttcggtttgccttttccctccctggtttgctcggtctgcgctcaccggagcacttcttgcacagccggagcccgccgccgtcgacccgaggctccaccgcaccgccgccgtccccaagcactctagagtttgcactcgaggtgagcaaccttcccatgcccttaattcgtctgttactgtccttttgcctgcgcaattcctcaccggagttgatccgcgccgccgttagcccgcctcaccgtgtcccgcgctctctggtgctcctacgccggcgtggtgcacacggtcgggttcgccagatcgccctgagcgcgctcgagctatttcccaaacccctagagccccgttgtggccatccccctcgtctccggcgagacctcgccgtggagccgagcggcgcagccctcatccgtaaaaccttctcggcgtcgatctccaccgttcgatcctaatctcgcgatccagatcactggatatcggttcgcacctgcgcgccctgtccccgggcccgccagtcagcgcctacgcccctggcgttgggcccgaccggtcagcccgttgttggggcgaaggcgaagacgccacccttcgctcgatgccttcgccaacctcgctgcactcacggagacaagacgactggcagacttacccttcgtcccacgcgtcgccggacgaagacctgtgacgaggtcgtctcatctcgcggcctcgtccaacatggaggcccacgtgtgatccggcccattgtaacaggccctacgtggccgctgcgcattacgggcctaatttgtaaaggtctccctgtaattacagtctgtaaccctgctttatgggaatattccggggataatctaggcgcctgagggcacatgcgtccttaactcaggacgttgggcactcagatacctataaatacccccgcacagtgcccttgagaggctagattaacagagcttttgccatctcgaattgaaaccttgtttacgttgcccccactcccccgttggatcaacttgctcgggagagcaagttccaacatttggcgcccaccgtggggctcgaacccacgaccttgctgacctcgccgaaacgtttgcgaacatgcgggacgcacgacttcgcctaaaccccgaaaagtgcgtcttcggcgttcgccaggggaaaatattgggctacctggtgtcacaccacggaatcgaggccaacccaaccaaaattcaggccatcatcaacatgacgcccccgcagtcagccagagacgtccaacgcctgacaggcagattggccgccctcaacagattcatctccaaatccgcagagcgaagtctccctttcctcaaaactctccgcggcgcaaaagacttcgcttggggaccagagcaggcggcgtccttcgccttattgaagcagtacctgttggaattggcgatttttacaagccccgactcctcgctacccctgttgctctatgttgcggcttcgccacatgcggttagcgcagcattggttcaagagcagaccacagagggcatgatcaggcaatgtctagtttattacgtctccgaagtgctcacaccatcaaaatgtaatatgacggaactggaaaagattgcctatgcagttgttatggcttcgcgcaaattgcgccactatttcgaggcattcaaggtctgggtcacctcagataggggactcggcgaattgtttagaaacccggaggcatcagtccggatcgccaaatgggcagccgaacttttcggctaccacatcacatttgaacccagggcagccatcaagtcacaagtcctggctgacttcgtcgtcgactggactgggccaacaacacaaccagacccgtctacagaaaaagtatggacaatccattgcgacggcgcatggtgccatgcgggggcaggcgccgctgcagtcattacttcacccacaggggtcaagcacagatacgcagcacgcctcagctttgccttggagtctgacagatgcactaacaacatagcagaatacgaagctgtcatcctcggccttcgcaagctaagggcccttggtgtcaccacctgcatcatcagaacagactccaaggtagtcaccggccaagtcgagaaagactacacaacgaaggaccccgcactcatgcagtacctcgcagctatccatagtctcgagagacaattcaaaggtttcaccttgtagcatgtgggtcgtgccaagaatgaggaggccgacgcgttggccaaggcagccgctagaggcgaggccctgccctccgacgtattctaccatgtcatcggcacgccagccgtccgcagcccagaggggctccaaataaccaatgacagcgagggccaccgcatagtcaaccttatcatgaccgaagactggcgggcaccaataaccctcttcttgcaggggtactatcatccaaccgacatcaatgaagccaagcgtctcaaacatcgaagccgggacttcgcactaatcgaaggacagctttacaagaagggagtcattcaacccatgcttaatgtgtcaccgagatcgaaggcgtccaaatcctacgcgaagtccacagcgggacctgcggctctcacgcagggcctagggcactagccgcaaaagtaatccgtcaaggtttttactggcccgccatgatctacaccgcaaatcgggtcacaaggtcctgtgaagcctgccagaaattttctccacgatcgggaagcccttcgcagttcacgaagctcatcgctcacacatggcctcttcagcgctagggcctggacatcgtcgggcccctacccacggcccaggggaacctcaagttcaccttcgtcgctgtcgaatactttaccaaatggatcgaggcgagggttgtatccacaataacatcgaagactgcccagaaattcttctgacaaaacattgtttgccgcttcggagtcccatccgaactcacagttgacaatggcaagcaatttgacagccaagacttcaaggatttctgcttctccattggcaccaagcttgcctttgcctcagtataccacccgcaatccaacggagttgtggaacgcgcaaatggcaaaattttcacagctgtcaagaagatgctcctcgacgataaaaagggaaagtgggccgatttgttacctgaagcggtctaggcattaaacacgactgagtgcagggtgactgggttcacccctttctgcctcctatatggatcagaggccatgaccccacaagaaataaaacatgggtcaccacggacagtcccgtcagccgtccccgacgtggacgagcccacttcgaaggacctcatcgacggagaccgcgtcttcgccatacaggctttaaacaaataccaagcccaaacaaaagcatggcgcgaccacacagtcatcccgagggaattcagcgaaggagacctcgtacttgtccggacagctcggacagagtccgggggcaagctcgagcccaagtgggagggccctttcatcgtcaagacgaaggcgtcccccagcgcgtacaggctcacaacgccatccggcgagaacctggagcattcttggaacattgataatctccacaaattttttgtttgactcctcagggccagctcgcccttgtaattcgcaaaacaattttattctggcccacactcttttcctcccagtgggtgaggtttttaacgaggcggagccatgtaatataccagcgaaaaatcccccgcaaaaatctacgtcgaaaaaagaccgcatcgacggtcttcgacattcgaccaatacaaagtcaccgtgaggggcagcgctagctaccctcgcgtgcgagaatccgagcaaaagtcgcctaagggtgcagccggactagcacaacaagtgcgcaaaatcgaagtcttcttcaaaagactatccgtgcaaaagccacctaatggtgcagccggactagcacaacaagtgcgcaaaatcgaagtcttcctcaaaagactatccgtgcaaaagtcgcctaagagtgcagccggactaattcaacaagcgcgccaaaacgcaagcgcattacatccatgcaaaagtctacaccaagaaactatccacgcacagaccaactacaggcgtagccggaccaacataataaatgtgccagaccaagcgtgcaacgcccctatggacatagccggatgcgcgaaggcgcacaacctcatcatacaaactatagtaacacacgtacagcgagggcatcacaccttacattggttcaactttcagaatgattcccatctccctatagttaaatagcattattctaagctcctcaccctcaaaaagacttcacaactccccctcacctacactcgccccagccggcgaggacaacaattcttgcttgccagccctgcccacacgaagccgatcgccatccacttcacccactctacgcttcgccaccgcccttcgccgcctacgcccagcactcggaccaggcacaacttcagcatctgcaacacgcggaaaagcctccgccgcagccacatccaaggccgcaaagtaatccaagtcctcatccgacgactcttccgtccactcaaccgaactcctagagtcaccgaaatcagaaaatttagacgcagactcatccgattcattcccagcatcccacggtcaaagccgccacaaaattagcagtagcggttgcgtgcgcaggcccaaaatcctgaacctgcgcagcaaccaaggttcagcaacatagacaaaattctctaactaccccacacccactaagccacctgcgaagacccagccgccgccatgggatcctccgctgccggctccgtcgccgccttcgggggatcctccaccctcggcacagcggttggcgacgagccaccaccggacacagtagctgcaggggcagcgagggagccttcaccgatttccgggggcggtgccgggtcgacctcagcctcagccaccaccgggttggcctccgcttcgggccgcacgctgttcaggggtccgaagtcctccatgtcctcggcacgcgccgcctacaacacagcacaccgattcagcaagcccacgcataccccacattcaaacaacactaaacaaaagacaaactttacctgatccatcgcccggtcggaccgctccctcaccacctcccgaccgtgggggccccacatccggtcaaagagggcacccgcggagtccttcaccatagggtcttcgaccttgaaaatctcgcgcccaaaatcttcatcagatcggtcgaagacctcatagtgtctgcatccctcgcgggacagcgcgttcatcgccccttcgcaggtgacgagggaggcaaaggacataaatccctccacaatggtcgggagcgccaacagttcctcttgcagccactcgaggaagcgaaggcccacctcccggtcgggcacttcgaagtcagcagtccgcgcgcccagctcgcggtatgagtccacgagctgtttgcgcgtccgctcaacttccgagcacgtagaggcctcggccctctccatgcgggcctgcagagcgttgaaccgcacctcccattcctcggcgcgctggttggcgagactaccctccacccgcgccaaattggcctccgcatgcgccttggcgatggcctggttagcctccctcctctcctccaccagctggcgccggaggtccgtcctctcgccctccagggcggccaccttctccgccagcttgcggcacttgctgtccgcggtcgacttttcccggacggcgtcagcatgctgcgcccgaagtctctcgacttcggcagacacatctgcagtaagggcccccgacgacacgcggtcggcgaagtcggccgcctaacagacacacatgagaccacaatccccatggaagcggtaaacaccgaagtccagctcaacttacttgactcagccgctgcgacgcctccctcagccggcgggacacagtgcccgcttcgtccttgacggcagtgaccgccgaaatctcaccgccagcgctgagagcgctacccttcaccccaggcaccgcggcagacaccgtggtcgccaccacaggcgaaacaacagcaagttgcccctcgcccgatcctgcagcgtatcaccagtttaaaaaaaaccttaccaacgagatagtcatccacgctaatatttgtgctgaagtcggccacgcgtttccccggcgaaggcaattcccggaccttcgcagctccgtccgggacagacttggttccgccggcgccggccgccttcacgctctccggcaccttgccggacccaggggcggccgacttcgccgccagcgtaggctggctaccgccggggacggtagccttcgcggtcccccgcgccctcttcggcctagcttcggggagcctgatgaccgcccggcgcttctgcgcaacttcctgacgatccttgttcatcactgccgacacaacagcagcaatattccgtccgtaaggaaacactacaacagaacaaccctgtaactacgcatgtctaacaacgcatggttttatatgttgcaaggaagcatataacaacacttattatgtgttgcaagtgttatgtgttgcttaggagcacaaagcaacgcatattatgtgttgcaagtgttatgtgttgctaacgagcatagagcaacacttattatgtgttgcaaatatcatcggtgtagttattgtatgttgcaattaaaccattaagtgattagatttgtagccaccataggcatgatttatatatgttgcaaggtaatccatacagtattgtaagtataactactttagaaaattactattgtaattatacatactgtacaaatttacgcaactgttttatgtagaccgtaaaaatttatagaaaactgatattgcaaaaaaacaaaatagtataccctagtatttgatcctgcaacctaacctatgggcataccataatctgtgctttagtaaccaaatgagctattgacgagttgtgataggaaagtgtttataatttacttattctatcttctgaacgcggtggatccaggtcccacaccggaggtacgctagggttccacctgagatcttccttcttcccgctctgctcgtctccccattggattcctcgccgcttgtggtttcttccccattgtcatagagtcaggcaaaggtcctgtgcgccgtcgcagatcttagggaggtcagtgcgccgtcgctattccctttgtctctgtgcgccctcgctcatcttctcttcgtctctgtgtgccatagctcctcttcccttcatcgaattccctggtggcgtggatattctggatagttccctgcatagttcctagcagcacaacggcataagtcagagggggagaagccaatcatcatccggtacgtttcttgatttcctcttcttgttgcctccgatcgacgaacactagggatgcgcttcgaaccagtagccgggtctcagtttcttagggagtgcatgaaaggttgaactagtaccattatttatcgactttctaacaatcagaagagtaaggtatggaaaattttctgaacatatctaaaacatgatatttgtttatgtatagactagctgggtaaatataattttgagctattattgtgttacttgtagacatctagaaatcaatatactaatacaattgagaaataagttttagattttttatagtagaattaacatcattattttttatagtttcataatggatttagaggtggtgaagcttcttttgcaatgttctaaaggctcggctcaatatgtagccggtgtaaaaggcttcttagaatttgcattcaaagataaacctgaaggaagcaagaattattgcccttgtaagtcatgcgtgcacactactgtgcagccaagcgc

SEQ ID NO: 373 - DNA, 13966 bp, Zea mays
  VARIATION (2185)..(2185): /replace="c" or "g" or "t"
  misc_feature (2185): /note="Nucleotide given in the sequence has no preference with respect to those in the annotation for said position"
  VARIATION (2196)..(2196): /replace="c" or "g" or "t"
  misc_feature (2196): /note="Nucleotide given in the sequence has no preference with respect to those in the annotation for said position"
  VARIATION (2224)..(2224): /replace="c" or "g" or "t"
  misc_feature (2224): /note="Nucleotide given in the sequence has no preference with respect to those in the annotation for said position"
  VARIATION (2253)..(2253): /replace="c" or "g" or "t"
  misc_feature (2253): /note="Nucleotide given in the sequence has no preference with respect to those in the annotation for said position"
  source: /note="Zea mays BAC clone full insert sequence contig bacm.pk147.d02.fis50"
ctggcacaagaacttctgataatttatgtcatgtgtagtgggagatgccagggggaaggaggaagcagacgttgaaagcaatgaggagtatctatcagaggaccatgtagggcaaaaaaaattacagaaaactcttgcacatgaatcagatagcgagatggaagaagaatcgtttgccgtaggtggacatgatcaaagtggtgaggtttctgaaatggagcctaattcaaagaacccaactgatatggatgcagacattgaggttgaagacgaaggtactgaaataagataacgtactttttaagaatagtcgtaatcatccatttgtaaccatttgttccattatttttgcattttgaccccggatagagacaaatgtggaggtgaaaaggcggggtaagacaaaactattacaggtgtggaacattcctagagggcataggattgtagtacaatgtaatgaacttgaccagccaattggagaagaggcaggaatcatgggaaaattccttggcatggtagccaggaatggaaacttgtgtagcttaagctacaaggattggaggctttttgatgcggacatcaacaccaacacgagcacatctacaccagcagcaccttctccagcccaggcgccaccccttccacctgggccagtgactcgggcccgtgcaagagaattgaactacatcatgttgttaaagaacgaaggcccggaagaatagacgaccagcccaattgcggcccataatggacgacctagggttggccgcccctaggggctgcgccccctctctatttattcaggagctgcgcctcctttatttcctgagttttgttttacgttagccttagctactctcgaacacgcgcaaatctgcgctgtcttcgtgtattcagaactccaccctcgagtaatagattagattgctcgcatcttgttcttgttcgttcttcgattgcgcacaggaaacgatcttcgtgatcaggccgatctcgcatcagcaaggtcggtaaccacagggagttggttcagcgattgcattggcgcctcgggcttgctcgtcgtagtcggatcgcaagggtcatcttccgacaaatcggaattatctctactcgccgaaagatcgggcacctcagcttcatcacttttgataggtaagaaagagagattgactaatgagcagaaaaataaggaggatatacttaagcaagtaaaggtatgacacatttattgcagtaattatctagaagatgatacatagggtaattttaccattgtctttatatattgtatgcagaggagattcctttatcctgctcgtatggaaaaatgggtactaaaaaccattggagagagatggaggcaacataaatctaacttaaaatccatatattatgatgcacataagggtttggaagctaattacaacaacgttccacctggggtaattgcggatcagtggattgcacttgtgaatcattgggtgaccacaaaagcaaaggtggctacctttacattaatcagttatcttgtgcaacttgtcagttgtgattacattatctatgtaatcattttatggtaggatataagcatggcgaatacgaataactgtggaaaaaaaagactacccatacagccggcacaaagagtttcgctcggactagagaggatttggtacttctgttgcaactacacttgtgaagaacatgctttttacaaccatatttctgtcactaatctttattaccttacatgtccaacagagggaaaaaggtcctgagaagaaataccctcacagggctattttatatatccacacacacaaagcaaaccctaccaagaacacaaatccacatgtggtacaattttctacaaatatttactggttcaaaatttttatgtacttgtgacatgctgaataagttaatccttttaaaagaatgatttgcaggaactgttagcagagcatccagaatttgcagacactagccaaggaaagattgcatggaatgaagatgcactaaacaagatattaggagaagagaagcctggtcatgtgcatggccttggtcttgttccaaacctgaacaaagtgttagatgggacaacatcaagacgtcttaatcagatacatgtaacatctttggacccaacagcaagtgaagatgtcctctctttgaaacttcagatgagaaaactcgtaaaccatgtacacaagcaagatgctactatacaagagtttgcacaaagaatatatgatgtagctgaggtgcccgatctttcggcgagtagagatatttccgatttgcgggaagttgacccttgcgatccgactacgacgagcaagcccgaggcgccaatgcaatcgctgaaccaactccctgtggttaccgaccttgctgatgcgagatcggcctgatcacgaagatcgtttcctgtgcgcaatcgaagaacgaacaagaaaaagatgcgagcaatctaatctattactcgagggtggagttctgaatacacgaagacagcgcagatttgcgcgtgttcgagagtagctaaagctaatgtaaaacaaaactcgaagaacaaaggaggcgcagctcccgtttaaatagagagggggcgcagcccctaggggtggccaaccctaggtcgtccactatgggccgcagttgggctggtcgtctattcttctgggccctcattccttagtacaatgacgaagttaagatctctggcacgggcccgagtgattggcccagctaatgaaggaagtggcgcttgatgttgaggtgctgctggtgtagtcgtactcatagtgatgtcctcatcatcctccccttcttgaagtgaagtcgtcctcgacggcaactcctcatcctcggccatatatggtttcaaatctgcaacattaaaactagtggaaacaccaaattccgcaggcaggtcaaggatataagcattatcattaatctttgttagcaccttaaaaggaccagcagcacgaggcattaatttagaacggcgcaaagtaggaaaccgatcctttctcaagtgcaaccaaaccatatcacctggctcaaaagtaacaagttttcttcctttactaccagcaacctgattttttgcattagtagcagcaatgttctgtttcgtttgttcatgtatggtaatcatttgttcaacatgtgcagcagcatctacatgtggcgcgttcgtagcattaagtgaaatcaaatcaataggtgccctagggatgtaaccataaacaatctcgaaagggcacatctttgtagaagaatgtgtggcatgattgtaagcaaattcaacatgaggcaaacaatcctcccaacgtctcaaattcttgtctaaaacagccctaagcatggtagataaagttctatttactacctcagtttgtccatcagtctgagggtgacaagtagtgctaaacaacaatttagttcccaatttattccaaagagatctccaaaaatggcttagaaacttagcatcgcgatcagagactattgtttttggaataccatgtaaacgaataatttctctaaagaacaattcagcaacaatgctagcatcatcagttttatgacaaggtataaagtgagccattttagagaatctatcaacaaccacgaaaatactatccctccccttcttagttctaggcaagcccaaaacaaagtccatagaaatatcaagccaaggagaagaagggacaggcaaaggcatatacaaaccatggttgttcaaccgtgacttagctttctgacaagtagtgcagcgtttaacaaggcgctcaacatcagcgcgcatccgaggccaaaagaagtgggcagccaacacctcatgcgtcttgtagacgccaaaatgccccatgagaccgcctccatgcgcttcctgtaacaacaaaagacgaaccgagctagctggaacacacagcttgttagcgcgaaacaggaacccatcctgtatgtgaaatttgccccatggtttcccattaatacaatggccgaaagcatctttaaaatcagcatcgtcaacatattgatccttcacagtgtccaaaccaaagattttaaaatctaactgtgacagcatggtatagcgacgagacaaagcatcagcaataacattgtccttcccgttcttgtgtttaataatgtaaggaaaggactcaatgaattctacccatttagcatgacgacggttcagatttgtttgggtacgaatatgttttaaagcctcatgatcagaatggattataaactcacgatgccaaagatagtgctgccatgtatgcaaagtgcgcactaaagcgtaaagctccttatcataagtagaatatttcagactagcaccgcttaatttttcactaaaataagcaactggttttccttcttgtaacaaaacagcacctagcccaataccgctagcatcgcattcaagctcaaacactttattaaaatcaggcaattgcaataggggagcttgggttaacttatctttcaaagtgctgaacgctacctcctgcgaatcactccaagcaaacggcacatctttctttgtaagctcatgtagaggcgctacaatggagctaaaatcacgaacaaatctgcggtagaaaccggcaagtccaagaaagctccgaatttgtgtgaccgtcgtcggtgtaggccactcccgaatggcaggaatcttgctgctatccacctcaatgccctgcggagtaaccacataaccaagaaacgagacacgttgcgtgcaaaatgtgcatttttccatgttaccaaacaagcgagcagcacgcaaagcgtcaaaaacagcacgcaaatgttctaaatgctcctctatagacttgctgtaaataaggatatcatcgaaataaacaacaacaaacaaacctatgaaggcccgtagaacttcgttcattaaacgcataaaggtgctgggagcattagtcaatccaaatggcataaccaaccattcatataaaccaaatttcgttttaaaagccgttttccattcatcaccgagtttcattctaatctgatggtaaccgctacgcaaatcaaccttagagaaaataacggcaccactaagctcatctagcatatcatcaaggcgtggaataggatatcgataacgaactgtgatgttattaatagcacgacaatctacgcacatacgccatgacccatctttctttggaacgagtaaaacaggaaccgagcaagggctaagagactcacgaatgtaatccttatcaagcagcgtctgcacctggcgctggatctccttcgtctcatctggatttgtacggtacggggcgcggttcggaagagaagcgccggggatgagatcgatctgatgctcaatgccacggaggggtggaagacccggtggtaagtccgtaggataaacatcagcatactcctgcaaaaggttaacaacagcagggggtatatccaaagacggtgcatcatcaagcggaacaagcattcgcgagcatacaagtgcataacagggcatatgagcttcatggagatcatcaaaatcagcacgtgtagcaagtaaaacaggagagtgcaacttgatttcagatttaataggtgcggctgatgtcgatttgacttgttgtgcagttttagcagccctagtaagatcatctttcaaaatttggtcaggggtcattggatgtataattattttctggcctttaaacatgaaagaataatgatttgaacgaccatgatgtaaactatcagtatcatattgccaaggtcgacctaataacaaagagcatgcttccataggaataacatcgcaatcagcataatcagaataagaacccagcgaaaaggggacacgtaccgaacgtgttacctttattttaccaccatcattaagccattgaatgtgatacggatgtggatgtgtgcgagtgggcaaggataatttctctaccaacgctgtacttgccaaattgttgcagctgccactatcgatgatgatgcgaatcgaccgttcgtgcatgacgcccttggtatggaatagagtgtgtcgctgatttttttcggcctgggcaacctgtgtgctgagaacacgctgcacaacaagactctcatacctatcggcgtcgatgggatcaacgtggacttcctcattttctgcatggttagtggcaatcatagcatgactagtttcctcagaatcactggctgaagagtactcaccattgtcacgtataagcaaggtacgcttgtttgggcagtcccgaatcatgtgcccaaaccctctgcaacgatggcactgaatatcccgtgtacgtcctgtggaagaagcggcgcctttggcagggggtgccactggcttggccggccctgtgcgcgatgtagtgctaggcgtaggaggtgcagggctggaaggagttgagctgtgtgttggaccccggcctgcaaaagagttagtatatgtctttgatcgtcgtccctgcacttcacgttcagctttgcaagcatattcaaacaatgtggttatatcaaaataatccttataatcaagtatatcctgaatttccctgttcaaaccaccacgaaaacgcgccatagcagcgtcatctgactcaaccaaaccacaacgaagcatacccttttgcaactcctggtaatattcctcaacagattgtgaaccttgttgaaaacgctgcattttgttaagcaaatcacgagcataataggaaggaacaaatctgtggcgcatggcagtttttaattgggtccaagtaatgacactgttaatgggaagtttttgtttatactcacgccaccaaattaaagcaaaatcagtaaattcactaatggcagccttcacttggctattagcaggaatatcatggcatgaaaatttctgttctacctccaattcccaatcaagatatgcagcaggatcatatttaccattaaaagatggaattttaaatttaatcttagaaaataagtcattagggggatgacgaaccacaagacgtgcacgaccacggcgatctccatcgtcctgctcagtgtcaccgccgtattcctgctccatctttgtggtcaatgcatcaaggcgtgccaggatggtgtcgagtgtggtgcgagtcgccgtttgagcaaggtcaagttggttgaaacgctcggtcgtcgaagtgatcgttgaatcaagccgttcatgcatcgtcctaatgtccgcagcaagtccatcaacttgtccccttacttcctgcaactgggcatccaccatgtcgtgtgctcctgccatagttagcgcaacaccaaaacaccaaaaggagaaaaacaaacgacaaaaacaggggtgtactgctcacaaggcgctcacactagtgctgttatcaagttcttatccgttcttaccaagccacagtggtgaactgcaaccaacaggtggaaccggtgaaagattggatgagcgattgcctggagaaacagaaaccttctcgtcgtagaaatatgtggagttttgggtaggctgcactcaagtcaatgattagcacgatcaaacaataatgcaaagttgaattatagtgcaaaacacgaaactatattgctggtcacaagtgcaaaggacggatggaactagcagaatggcagtaccgtaaatattgtactagcgaggccactagtaggaatcacaagtgattttgtttttcttttttgtatgatttttttttgatatttttctcagcacaagaagcaacaaaataggagctacacgaagtttcacctaaaacagaaatcagatgtggtctatagaaaatctcgaagttctctgaaaagcgtgcgagaactttgacgaatttttttctttattttcctgaatttttttgacaattttgtcgaaccccaaacagaccgtaggtgagtttggccggactcagaatggtgtcgacaagctcctgtaaaaatttcagattttttggacacccgagcgaaaagttatgcctgttttacggaaggtacctcaagttatgttttaaaaacgaccgggatgaaacaaccgtatcctttctccttcgttttcttttttttgtttctgttttttttgagtaaccgaaggagaaaaacaaggaagcggttgttgactcggtttgtttttttcgtaaccgaaggagaaaaacaaggaaacggccgttgactcggtttgttttttttttgtttttttttgacgtaaccgaaggagaaaaacaaggagacgatgttgactcggtttgtggcgtgatcaaacgggagatggtggcggcgctagggtttgaatggtggaagaacacaatgcaaccagcaacaaggaaacgcggaagcacacaaattcaacaatgcagattattgaaagaaagtgcgaggctcaaaagggtgctgggataagatctaacctgaatttttatgtggttttgtggactgtaggaaaaaaacgctcgataaactcaccgatcaacctgaaaatctgataccaattgatgtagctgaggtgcccgatctttcggcgagtagagataattccgatttggcggaagatgacccttgcgatccgactacgacgagcaagcccgaggcgccaatgcaatcgctgaaccaactccctgtggttaccgaccttgctgatgcgagatcggcctgatcacgaagatcgtttcctgtgcgcaatcgaagaacgaacaagaaaaagatgcgagcaatctaatctattactcgagggtggagttctgaatacacgaagacagcgcagatttgcacgtgttcgagagtagctaaggctaacgtaaaacaaaactcgaaaataaaggaggcgcagctcctggataaatagagggggcgcagcccctaggggcggccaaccctaggtcgtccactatgggccgcagttgggctggtcgtctattcttctgggccctcattcttcagtaccatgacgaagttaagatctctggcacgggcccgagtgattggcccagctaatgaaggaagtggcgcttgatgtggaggtgctgctggtgtagtcgtactcatagtgatgtcctcatcagagggtacctgacccctcggctgggggagttgaggcgaccccggggagccaggccgaggcgtctgttccccgagagccgtcgcccacgccggcagcgcaggagagcgaccctcaggtcgccgtggcagtgcctgggcagtccgccccccgggcgtccaaagcgcccaaagcaagggcggtgccgaagctgccggcgaagcggacctcgacggcgcctttgggggtcgagatccgagagacctcccctcaggcacggttgatcatggcccggagcgggtaagtatcttggaacgtcttcatcctggcttttcattcgtatgtcccgaccgtgatttttctttccccctcagcaagcgaagccatggcctgaccgatctggctcccagaaaggcccttaagatggcgtcggcttgcgcagccggggccgctctgggccttgccgtccagctgaccttctcgcaaggcgccccacagcagggggctcaggcggcaccagtcgccgtggagcgagttcccgaggccggctcttctaccgaggcggccatcgtgctaggggaggcggctgacgcggacgtggcctcggccccaccggacgtgccggtggtgctggcacctgttgctactgaagccgccaccgtcccagtcggggagcgaccggtcgctgccgacgctgagacggccgaggcgtcggcgcttggtgcctcggaggaggggggcgtggagacgcgatccgtcccgccgggcggcagccttgtcgctgtgcggcggggctccgagggtcggcgccagttgctccagttccggacacgtgaggcctcggatcccgtcttcgtcctcgacgatgaacgggaggaacagtcctgggacgagctccacgagtgtgccgaagcaacggtggggtcgctccggtcgtcgctggaggttttctgcagggacgttcccaaaatcctccaggtaacggtttcgggcataccttttctcctttgtgaccaaggcgttttttcgtgacgtcccgcttccttcccctaggatctgacggatctgagcgccgccaagtcgtcgttcatccgccgcgaggtcgacgtctggggctcgctgcgatccctgaggacctcactcgccggggctactgcgcgcctctctcagcagggcgccgaggcggcggatcttcggttgctctgcaccgatctgagagccgaggcggcagcggcacgcgcagaagtgcaacgactgcagtcggagttcgaccggatcgtcaacgagcgggaccaatctcggggccgggctggagcccttgcagccgacctagccgtagcccaggtcgcagcctcggagcagcgtgcccgagtcggaggtacgccttggccatcttcggttttcgtttctgcttgtttcctccgcttgtgtttgagatctttcttctggctgttcgcagagctcgagtccgcccttgatgagtccgccaaggcgcttgccgaggcgcttgccggggcggccgagcagagggaggccgaccacgcggccatgtccgaggccgtctcggacttctgtcgggtccttggctccggcgacgtcccctcaggaagctcccctcaaagtcgcctgcaggtcttgggcgatcatgtgcgcagtagactccgcgaggcgctacaccacggtgtcaggcgggccttcgccgtgctcgcttcccactacgttgtggacctggagcgggtcagcgaggggtattgccttcctgacgaagatgaagccgccctggcagaagtccagaggctcgatgcggccgccgcgggtccaagcgcagtgctggcgaccaccttcgaggcagagatcctcccacctgcgccgtcgtccgaagccgggatggactttgccaagggcggggacgaagccgaaggcgcgggtccttcccagggcgacgcctaactctgtcggagcagtttctgttggatgcacgtgtgtctttctgcggccgctgaggcctgaacactttattaccgttgcatgaagtcgtgctcttctccctttcattttgcgcgtccggccccgcctgtcagtagcagggtggcttccccaagtaggggttacttttcgtggcgggtgacgagtgaggtgtccgtaacccagaggtgtaggacgatgaagacatccacactactgatacatctatgccaatacaagtaccaatttctggtcccattactcgcgctcgtgctcgtcaactcaaccatcaggtgattacactcttgagttcatgtccatcttatttagaccatggagacccgtgcactcttgttttgcttaggaaccagggagaagaccgaaagggaaaaggatttgaacatgctggattcggactgcagaagaacaccaacttgtgacggtcaccacggtcagatgcgggctcggattggaatgttcaagcacaacatggaaagcttatcaagtctactttcatatggatccggaattatagtcatatctgttctgaggccgccgtaatcattgttttcttaccgagatattttctgccttttctgcccatggtgctgcgtcaccctattttggcccaatgggtcgtgtatcaagttaggtccattagggacgcatcctagggttgcagcacgaccccaatacccttgtggtcgtcctcccatgtttatagaccccctagccgccaccaagaacagcgggttttgtttagatcaagtttagctctcgctacttgcttgcaagcgcgcgtgctagttcagccgcccgtcttcttgtcttcggaaccccaccatattggagtttgactttgaaacctacatttagatctggtaattcagtacttgttctacttgttcttgctagttcttcgattgcttgcaggacgagtgccctagtgggccagggtgtcacgctccacaagatcgtgacagccataggaggtggtgtatcggttgctaaggcgcagcgtctttggaaggctgtagtcgggccgtgaacgtcgtctcctcccccaatcgagttattccacaccctctcatcgaaagatcaggcaatcacccaacgggtgcacatcagttggtatcagaggaaggtttatcggtgagagatttacttttcttcgttgttttcttatctcctgtagtccagaaaaagccaaaaaaatagtagattagttttaccgcaatcctataaaccattgagcatttactaatactacttagttagggcttgttgagtttttggttgcatcggttgtgtcgagttgctggtcttagtttattcctttagagttttgagttctaccatgttttggtcaccacgagatccaccattaccataaacatctctggttcgtttttgccaccacggatacatctcatgtccgatttggaagtttaaatacaatctggaaagcttatctcatcttctttccaacggatctgaccttatctcaaaattcattctgagcgctccgcaatcatcgtagagatttctggactttctatattaacaagatttgttaaatctgatttaaaggggctgttagcaatatctttattgtttgggttgtcatagtgaaaaaagggtttaggcccctgcaaaaaaaaagaagaagaaaaagaatagaaaagaaaaaaaaagaggaaaagaagaagggggctgaatctctaaatctgttgtttctctctgtgctgtgctagttgttctttttcagtgactacctttgtgccaaggctcacgtctctagcatggtttagcctaggaccagcacagtaccaccgttgaacgattattcagcttgcttttgtaactaacgttgtactagtgtattccttgcttcagcccacctacaactctacatatttcgactacagtttgacaggtcgtgttgctgcggcaccgatacacttattccacggttgcagacttgttggttgctgacccctcctattgtgcaaggtaagaattggtaagagcttgtgtggcaggttgagagtgagcgccttgcagtagctacatcctaatagttgtagagtttttattccttcacgtttttttttcttgttgcctctgttcgtctaaccatggcaagattggaggttgatgatgcttctcgtaatatgccacactctcctcgcaccaagggtatcatacaacactttgtaaggctggtgaagacgcacacggaaggccttgataatgacatgcaggtgacgaatgaaaagatggggcaattggaggccacacagatcgacacaaacaccaaacttgcaaatgtggaaatgacagttgctcatattgacaagagccttgtcgcactcttgaggcgatttgatgagatgcatgctaataccaatggtgggcgtgatgagggcgccaaaggtaactgggatgactatgttgctgatactgaacaagatgaccaagaagcacctaatcgtcggcgactacgtactaaccgtagaggtatgggtggttttcgccaacgtgaggtacatggtaatgatgatgcttttagtaaggttaaatttaaaatacctccttttgatggtaaatatgaccctgatgcttacattacttgggagattgcggttgatcaaaagtttgcatgccatgaatttcctgagaatgcgcgggttagagctgctactagtgagtttactgattttgcttctgtttggtggatagaacatggtaagaagaatcctaataacatgccacaaacttgggatgcgttgaaacgggtcatgcgggctagatttgttccttcttattatgcacgtgatatgttaaacaagttgcaacaattgagacatggtactaaaactgtagaagaatattatcaggaattacaaatgggtatgctgcgttgta

SEQ ID NO: 374 - DNA, 758 bp, Zea mays
  VARIATION (15)..(100): /replace="c" or "g" or "t"
  misc_feature (15)..(100): /note="Nucleotides given in the sequence have no preference with respect to those in the annotations for said positions"
  source: /note="Zea mays BAC clone full insert sequence contig Ch4 bacm.pk184.c21.fis1"
ggaaacgcgcattaaaaaaaaaaaaaaaaaaaaaaaaaaaaaaaaaaaaaaaaaaaaaaaaaaaaaaaaaaaaaaaaaaaaaaaaaaaaaaaaaaaaaaatttcgcgtgatttcattgtcgcacgtcacccattccgaaaacgggtgtcggggtgcatacaagcacgagtttttgccaccggaaccatttcttcgtttttcgcaacgaacataaccaatccactactttaggtccaaaactcatgtttgcggtggtttcgcgcaatttcattgccacaggtcagccaggccgaaaacgggagtcgggttgcaaccgaaaaatttcttcttttttcgcaacgaatataaccaatccactactttaggtccaaaactcatgtttgcggtggtttcgcgcaatttcgttgccgcacgtcacccattccgaaaacgggtgtcggggtgcatacaaccaagagttgtggccacgggaaccatttcttcgtttttcgcaacgagcatgccctatctactactttaggtccaaaactcatgtttggggtggtttcgcgcaatatcctttgccgcacgtcactcattccgaaaaacgggtgtcggcgtgcatacaaaagcacaaagtttttgccgcgggaacaaattttctcgttttttggccacaaagatcactcaccccattttttggcgcaaaacccccatgtctggagggtggtctgcccaaaattttttttgggggtgtttacctctttttaaaaaaaggg

SEQ ID NO: 375 - DNA, 777 bp, Zea mays
  VARIATION (1)..(1): /replace="c" or "g" or "t"
  misc_feature (1): /note="Nucleotide given in the sequence has no preference with respect to those in the annotation for said position"
  VARIATION (5)..(79): /replace="c" or "g" or "t"
  misc_feature (5)..(79): /note="Nucleotides given in the sequence have no preference with respect to those in the annotations for said positions"
  source: /note="Zea mays BAC clone full insert sequence contig Ch4 bacm.pk184.c21.fis2"
agacaaaaaaaaaaaaaaaaaaaaaaaaaaaaaaaaaaaaaaaaaaaaaaaaaaaaaaaaaaaaaaaaaaaaaaaaaaagcaaaatgtgcacttctcaaggttaccaaataaacgtgcatctcgtaaagcattaaaaacagcacgcatgtgatcaacatgttcatccatagatttgctgtagattaatatgtcatcaaagtatactaccacaaattttccaatgaaggcacgcaaaacctcgttcattaatctcatgaaagtgctaggtgcattagttaacccaaaaggcatgactaaccactcatacaatccgaacttagttttgaaagcagttttccattcatctcccaatttcatacgaatctggtggtacccactacgcaaatcaactttagaaaagacaatggcaccactcaattcatcaagcatatcatctaaacgtggaatagggtgtcgataacgtatcgtgatattattaatagccctacaattaacacacatacgccatgttccatcttttttaggcactaaaataaccggaacagcacacggactaagagactcacgcacgtaacctttgtcgagtagttcttgcacttgtcgctgaatttcttttgtttcctctggatttgtcctatatggcgcacgattcggcaaagatgcaccaggaataagatcaatttggtgctcaatccctcgtataggtggcagcccctctggtatctcacttggaaatacatcagaatactccctgcaaatgttagtaataacaggag

SEQ ID NO: 376 - DNA, 770 bp, Zea mays
  VARIATION (5)..(81): /replace="c" or "g" or "t"
  misc_feature (5)..(81): /note="Nucleotides given in the sequence have no preference with respect to those in the annotations for said positions"
  source: /note="Zea mays BAC clone full insert sequence contig Ch4 bacm.pk184.c21.fis3"
cgacaaaaaaaaaaaaaaaaaaaaaaaaaaaaaaaaaaaaaaaaaaaaaaaaaaaaaaaaaaaaaaaaaaaaaaaaaaaaaggagcttgttgacaccattctgaggccggccaaactcaccttcagtctatttggtttcgacaaaattgtcaaaacaattcaggaaaataaagaaaaaatccatcaaagttttcgcacgcttttcagagaacttcctgattttctgtagaccacatctgaactctgttttaggtgaaactttgtatagctcctattttgttgcttcttgtgctgagaaaaatatcaaaaaaatcatacaaaaaagaaaaacaaaatcacttgtgattcctactagtggcctcactagtataatatttacggtactgccattctgctagttccattcgtcctttgcacttgtggccagcaatatagtttcgtgttctgcactataattcaactttgcattattgtttgattgtgctaatcattgacttgagtgcagcctacccaaaactccacatatttctacgacgagaaggtttctgtttctccaggcaatcgctcatccaatctttcaccggttccacctgttggttgcagttcaccactgtggcttggtaagaacggataagaactttgatacagcactagtgtgagcgccttgtgagcagtacacccctgttttttgtcgctgggttttttttctccttttggtgtttttgtgggttgcgctaactatgggcagagcacacgacatggtggatgcc

SEQ ID NO: 377 - DNA, 569 bp, Zea mays
  VARIATION (5)..(104): /replace="c" or "g" or "t"
  misc_feature (5)..(104): /note="Nucleotides given in the sequence have no preference with respect to those in the annotations for said positions"
  source: /note="Zea mays BAC clone full insert sequence contig Ch4 bacm.pk184.c21.fis4"
atccaaaaaaaaaaaaaaaaaaaaaaaaaaaaaaaaaaaaaaaaaaaaaaaaaaaaaaaaaaaaaaaaaaaaaaaaaaaaaaaaaaaaaaaaaaaaaaaaaaaatcctgtctgcagggcctgatactcagcaatgccctcagagcacagaaagatgctgaggacgaaggatgtactatagccctgagcaaccttcgttccgaagtaattgaactgaggaacgaaggtctcgaaaaagacaaaatattgcattccttaataaataaaataaaagaagacgaagctattttcaaaggtcaggccgaagctcagaagtgtgaaattgaaaaccttcgtaaacaattagccagagctaaagaggaatgcatacttgaagaaaacaggcgagaactcagcgaccaatgggcaaatcatttagaagaaaactgttaagagcttcggtcagcccaagaagaaatgcttcgacaaatcttatagagtgtgtcaaggaaaataaaaacttagcttcgcccagcgtttgggggccatttttccgcaaggaaggaaaaacttttattaaggaagggtaac

SEQ ID NO: 378 - DNA, 782 bp, Zea mays
  VARIATION (1)..(1): /replace="c" or "g" or "t"
  misc_feature (1): /note="Nucleotide given in the sequence has no preference with respect to those in the annotation for said position"
  VARIATION (16)..(66): /replace="c" or "g" or "t"
  misc_feature (16)..(66): /note="Nucleotides given in the sequence have no preference with respect to those in the annotations for said positions"
  source: /note="Zea mays BAC clone full insert sequence contig Ch4 bacm.pk184.c21.fis5"
agacgcgtatagactaaaaaaaaaaaaaaaaaaaaaaaaaaaaaaaaaaaaaaaaaaaaaaaaaaatttacttgatttaggtccaaaacgcatgtttggggtggtttcgcacaatttcgttgcagcacgtcacccattctgtaaacaggtgtcgggtgcatacaagcaccagtttttgccaccggaaccatttcttcgtttttcgcaacgaacatgccgaatccactattttaggtccaaaacacatgtttgggttggtttcgcgcaattttattgccgcacgtaaccaattccgaaaacgggtgtcgggttgcatacaagcacgagtttttgccaccggaaccatttcttcgtttttcgcaacgaacatgcccaatccactactttaggtccaaaacacatgtttggggtagtttcgcgcgatttcattcccgcacgtcacccattccgaaaacgggtgtcggggtgcatacaaacacgagtttttgccaccggaaccatttcttcgtttttcgcaacgaacatgcccaatccactactttaggtccaaaactcatgtttgcggtgggttcgcgcaatttcattgccgtacgtgacccattccgaaaacgggtgtcgggggcatacaaacaccaagtttttgtgcccgaaacctatcttcttttttctccaacaaaaaatcccaaacccttacttttggagcaaaaaaccaatctttgtggggagttgttccaaaaaattattttgcggcgggtttaacgcaatttttaaaaggggggggg

SEQ ID NO: 379 - DNA, 904 bp, Zea mays
  VARIATION (14)..(102): /replace="c" or "g" or "t"
  misc_feature (14)..(102): /note="Nucleotides given in the sequence have no preference with respect to those in the annotations for said positions"
  source: /note="Zea mays BAC clone full insert sequence contig Ch4 bacm.pk184.c21.fis6"
cgcaacgcgcattaaaaaaaaaaaaaaaaaaaaaaaaaaaaaaaaaaaaaaaaaaaaaaaaaaaaaaaaaaaaaaaaaaaaaaaaaaaaaaaaaaaaaaaaagcttcggcgagtcagcttcaagcttcctggcaacagcctccgcctccacctccgttgcaacagggccagcagccagaagggagccaatatgctccacatcaaagggacttcagagaacagtccgaagctcgcacggtcaacagcaccgtgccagaatcaaagcacatctattgacaaatatcctaccttaatagcaatctttttcattcagttttattttctgtaataaagaacattgtttaggtttcatgtaattagtttcgttgattcctacaagaaaaatatgttttcttcacaggtttgtgataataaaaaggaccttcggactatcgaaaattcttcgaagcaataacaagtcgttctaaggaacgcagagtaagtctgacgaagtcacaaaaagtcgttccgaagggagcgcagtgtaagttttctgctccaaagtcgttcctaagggaatgcagagcttataccgcctaagtaaaaggcgaagaagctccaaagtcgttcctaagggaatgcagagcttataccgcctaagtaaaaggcgaagaagctccaaagacgttcctaagggaatgcagagcttataccgcctaagtaaaaggcgaagaagctccaaagacgttcctaagggaatgcagagcttacagcgaagaatcagcgctaatacaaaaatattgtgtggggatatgtgtgtatctttcggaacaaatgtcatctacataacataacatcatcacatcattttgcatagcatgagcatcatacatcatgttgcatatggcacaagaaagggacacaa

SEQ ID NO: 380 - DNA, 169 bp, Zea mays
  source: /note="Zea mays BAC clone full insert sequence contig Ch4 bacm.pk184.c21.fis7"
cgaaggaagaatatgtctgtgttaatagttttaaacaaacgaaaaatcttgaactcaacaaaaatataagaattctatttgtcgcacctttaaactgttgtaagctaggctgtcagccagatcgttctttgacagcaccgaaagtccgtcttctaaagttgggaatccg

SEQ ID NO: 381 - DNA, 851 bp, Zea mays
  source: /note="Zea mays BAC clone full insert sequence contig Ch4 bacm.pk184.c21.fis8"
gacgtgcgggaatgaaatcgcgcgaaactaccccaaacatgtgttttggacctaaagtagtggattgggcatgttcgttgcgaaaaacgaagaaatggttccggtggcaaaaactcgtgcttgtatgcaacacgacacctgttttcagaatgggtgacgtgctgcaacgaaattgtgcgaaaccaccccaaacatgcgttttggacctaaagtagtggattgggcatgttcgttgggaaaaaacgaaaatatggttcctgtggcaaaaactcgcgcttttgtatgcaccccgacaccctttttcagaatgagtgacgtgcggcaacaaaattgcgcgaaaccaccccaaacatgagttttggacctaaagtagtggattgggcatgttcgttgcgaaaaacgaagaaatggttccagtggcaaaaactcgtgcttgtatgcaccccgacacccgttttcggaatgggtgacgtgcggcaatgaaattgcgcgaaacccccgcaaaaatgagttttggacctaaaataatgaattggttatgttcgttgcgaaaaacgaagaaatggttccggtggcaaaaactcgtgcttgtatgcaccccgacacccgttttcggaatgggtgacgtgcgacaatgaaatcacgcgaaaccgctgcaataaaattgtgcgaaaccaccccaaacatgtgttttggacctaaagtagtggattcggcatgttcgttgcgaaaaacgaagaaatggttccggtggcaaaaactcgtgcttgtatgcacccgacacccgttttcggaatgggtcacgtacggtaatgaaattgcgcgaaaccaccgcaaacatgagttttgga

SEQ ID NO: 382 - DNA, 1471 bp, Zea mays
  source: /note="Zea mays BAC clone full insert sequence contig Ch4 bacm.pk184.c21.fis9"
gagacacaatcttcatcttcggagtatagcttgggagaatgttttcacgaagcttggatattcttcatctgagcactatggacattgttgtgatacatagaaattttcttcacgaagcatgaaaagaagggataggtgttttttcgccagactcaaaaaaggtatgtatgaaaagtttcatgcatcgtaaagaattgaaccataaagagaaataaaacaaatatgttacatacaggattacaagatattacatatgttacatttaaaatgtttttacaatagcatctagtcttccctaagtaccacttctgcagcttcgttcaacagtcgatcgacaacttcatccataatagcttcagccatctttttaatctcatcgtcacccttaggccgtgcacccggagatacttcagtaggatctgaggaaggacaggacacggctgctttgctgttacaagttgcaaacaaatcttaaagcctaagattacaacacgataaaaactattatttaatacctaattgaccttcggcctctgcgctcttttcagcagcctcagctacttctctagcatcatgaatgcccttttcacttcttcgaataatttctccggccatttctcggccaccattatcccagatatcggtaaaaaactttccaccaattatgctagcttcggccgaggggtctcttgtatcttcataggacaaggcagcttcggactgtgctaaaatttttacatgttcgcagcccttcttctctaagatggtggcaatccctctggcgccagagaaggcacatatatctcctcggctatttaaaatttcttcgaaggcttcagcttcatggtcaatccattcaatgacaccttcgggattgcctctcgaaaagttttcttcacttgagaatgcgccgaccttggcgaagctagcctttaattttttaacgcaatctatagatttattgtagcatctctttttggatgaacgaagctcttcaacagtcacttctaggtgatctgcccattgatcgctgagttcacgctttgtttcttcaagtatacgttcttctttggctctcgccagttgtttccgaaggtcttcaatttcgcgtttctgagcttcagcttgacttttaaaagcagcttcgtcctcctttattttatctattaatgagtataatattttgtctttttcgagaccttcgttcctcagttcaattacttcggaacgaaggttgctcagggctatagtacaaccttcgtcttcagcatctttctgtgccctgagggcattactgagcatcaggccctgcaaacaggagcatgtctgtgtcaatagttttaaacaaacgaaaaattttaaactcgacaaaaaaatacaagaattccatttgtcccacctttaaactgttgtaagctagactgtcagccagatcgttttttgacagcaccgaaagtccgtcttctaaagt

SEQ ID NO: 383 - DNA, 2328 bp, Zea mays
  source: /note="Zea mays BAC clone full insert sequence contig Ch4 bacm.pk184.c21.fis10"
aatcaaaataatcatataatcaagtatatcgtgaatttccctgttcaaaccaccacgaaaacgcgccacagcagcgtcatccgactcaaccaaaccacaacgaagcatacccttttgtaactcctggtaatattcctcaacagattgtgaaccttgttgaaaacgctgcattttgttaagcaaatcacgagcataataggaaggaacaaatctgtggcgcatgacagtttttaattgggtccaagtaatgacactgttaatgggaagtttttgtttatactcacgccaccaaattaaagcaaaatcagtaaattcactaatggcagccttcacttggctattagcaggaatatcatggcataaaaatttctgttctacctctaattcccaatcaagatatgcagcaggatcatatttaccattaaaagatggaattttaaatttaatcttagaaaataagtcattagggggatgacaaaccacacgacgtgcacgaccacggcgatctccatcgtcctgctcagtgtcaccgcctgctccatctttgtggtcaatgcatcaaggcgtgccaggatggtgtcgagtgtggtgcgagtcgccgtttgagcaaggtcaagttggttgaaacgctcggtcgtcgaagtgatcgttgaatcaagccgttcatgcatcgtcctaatgtcagcagcaagtccatcaacttgtccccttacttcctgcaactgggcatccaccatgtcgtgtgctcctgccatagttagcgtaaacaccaaaacaccaaaaggagaaaaaccgacgaaaacaggggaatggtggtgacaacttgctcgctcgatggaatgctgttatcaagttcttatacgttcttaccaagccacagtggtgaactgcaatcaacaagtggaaccggtgaaagattggatgagcgattgcgtggagaaacagaaacctgctcgtcgtagaaatatgtggagttctgggtaggctgcactctagtcaaggattagcacgatctaacaataatgcaaagttgaattatagtgcaaaacacgaaactatattgttggccacaggtgcaaaggacagatggaactagcagaatggcagtatcgtaaatactgtactagtgatgccaaaaaggcactagtaggaatcacaagtgattttgtttttcttttttgtatgatttttttgatattttctcagcacaagaagcaacaaaataggagctacacgaagtttcacctaaaacaaagttcagatgtggtctacagaaaatcaggaagttctctgaaaagcgtgcgagaactttgacgaatttttttctttattttcttgaaattttttgacaattttgtcgaaacccaaacagaccataggtcagtttggccggcctcagaatggtgtcaactagctcctgtaaaaatttcagattttttggacaaccgagcgaaaagttatgcccggtttaaggaaggtacctcaagttatgtttaaaccgaccgagatgagacaaccgctttgtttcctttccctatttttttgtttgttctctggttctatgctttctctttctttttcttttttttcttttcttttttttgtttctgttttttttacgtaaccgaaggagaaaaacaaggaagcggcgttgactcggtttgtggcgttgaatcggtttgatgtaaccgaaggagagaaacaaggaagatggttgcgacacgctagggtttgatgtaaccgaaggagaaaaacaaggtagaagaaggatggtgagaaaaaaacacaatgcgaccagcaacaaatgaaccgaaagcacacaaattcaacaatgcatattattgaaataaggtgcgagactcaaaagggtgctggtataaggtctaacctgaatttttatgtggttttgtggactgtaggagaaaaaaacactcgataaactcaccgatcaacctggaaatctgataccaattgatgtagctgaggtgcccgatctttcggcgagtagagataattccgatttggcggaagatgacccttgcgatccgactacgacgagcaagcccgaggcgccaatgcaatcgctgaaccaactccctgtggttaccgaccttgctgatgcgagatcggcctgatcacgaagatcgtttcctgtgcgcaatcgaagaacgaataagaaaaagatgcgagcaatcaaatttattactcgagggtggagttctgaatacacgaagacagcgcagatttgcgcgtgttcgagagtagctaaagctaacgtaaaacaagtacttgaaaacaaaggaggcgcagctcctggatacaggcccg

SEQ ID NO: 384 - DNA, 2017 bp, Zea mays
  source: /note="Zea mays BAC clone full insert sequence contig Ch4 bacm.pk184.c21.fis11"
caagtaatgtaagcatcagggtcatatttaccatcaaaaggaggtattttaaatttaaccttactaaaagcatcatcattaccatgtacctcacgtcggtgaaaaccacccatacctctacggttagtacgtagtcgccggcgattaggtgcttcttggtcatcttgttcagtatcagcaacatagtcatcccagttaccttcggcgccctcatcacgcccaccattgatattagcatgcatctcatcaaaccgcctcaagagtgcgacaaggctcttgtcaatatgagcaactgtcatttccacatttgcaagtttggtgttcgtgtcgatctgtgtggcctccaattgccccatcttttcattcgtcacctgcatgtcattatcaagaccttccgtgtgcgtcttcactagccttacaaagtgttgtatgatacccttggtgcgaggagagtgtggcatattacgagaagcatcatcaacctccaatcctgccatggttagacgaacagaggcaacaagaaaaaaaaaacgtgaaggaataaaaactctacaactattaggatgtagctactgcaaggcgctcactctcaacctgccacacaagctcttaccaattcttaccttgcacaacaggaggggtcagcaaccaacaagtctgcaaccgtggaataagtgtatcggtgccgcagcaacacgacctgtcaaactgtagtcgaaatatgtagagttgtaggtgggctgaagcaaggaatacactagtaccacgttagttacaaaagcaagctgaataatcgttcaacggtggtactgtgctggtcctaggctaaaccaggctagagacgtgagcctaggcacaaaggtagtcactgaaaaagaacaactagcacagcacaaagagaaacaacagatttagagattcagcccccttcttcttcttttccttttttttcttttctattcttttttttcttcttcttctgtttttttttgcaggggcctaaacccttttttttcactatgacaacccaaacaataaagatattgctaacaacccctttaaatcagatttaacaaatcttgttaatataggaagtccagaaatctctacgatgattgcggagcgctcagaacgaattttgagataaggtcagatccgttggaaagaagataagataagctttccagattgtatttaaacttccaaatcggatatgatatgtatccgtggtggcaaaaacgaaccagagatgtttttggtgatggtggatttcgtggtgaccaaaacgtggtagaactcaaaactctaaaggaataaactaagaccagcaactcgacacaaccgatgcaaccaaaaactcaacaagccctaactaagtagtactagtaaatgctcaatggtttataggattgcggtaaaactaatctactattttttggctttttctggactataggagataagaaaacagcgaagaaaagtaaatctctcaccgataaaccttgctctgataccaactgatgtgcacccgttgggtgattgcccgatctttcgatgagagggtgtggaataactcgattgggggaggagacgacgttcacggcccgactacagccttccaaagacgctgcgccttagcaaccgatacaccacctcctatggctgtcacgatcttgtggagcgtgacaccctggccactagggcactcgtcctgcaagcaatcgaagaactagcaagaacaagtagaacaagtactgaattaccagatctaaatgtaggtttaaagatcaaactacaatatggtggggttccgaagacaagaagacgggcggctgaactagcacgcgcgcttgcaagcaagtagcgagagctaaacttgatctaaacaaaacccgctgttcttggtggcggctagggggtttataaacatgggaggacgaccacaatggtattggggtcgtgctgcaaccctaggatgcgtccctaatggacctaacttgatacacgacccattggg

SEQ ID NO: 385 - DNA, 1767 bp, Zea mays
  source: /note="Zea mays BAC clone full insert sequence contig Ch4 bacm.pk184.c21.fis12"
cgaaaaaattgcagcacgaccccaatacccttgtggtcgtcctcccatgtttataaaccccctagccgccaccaagaacggcgggttttgtttagatcaagtttagctctcgctacttgcttgtaagcgcgcgtgctagtcagccgcccgtcttcttgtcttcggaaccccaccatattgtagtttgatctttaaacctacatttagatctggtaattcagtacttgttctacttgttcttgctagttcttcgattgcttgcaggacgagtgccctagtggccagggtgtcacgctccacaagatcgtgacagccataggaggtggtgtatcggttgctaaggcgcagcgtctttggaaggctgtagtcgggccgtgaacgtcgtctcctcccccaatcgagttattccacaccctctcatcgaaagatcgggcaatcacccaacgggtgcacatcagttggtaatcagagcaaggtttatcggtgagagatttacttttcttcgctgttttcttatctcctatagtccagaaaaagccaaaaaatagtagattagttttaccgcaatcctataaaccattgagcatttactagtactacttagttagggcttgttgagtttttggttgcatcggttgtgtcgagttgctggtcttagtttattcctttagagttttgagttctaccacgttttggtcaccacgaaatccaccatcaccaaaaacatctctggttcgtttttgccaccacggatacatatcatatccgatttggaagtttaaatacaatctggaaagcttatcttatcttctttccaacggatctgaccttatctcaaaattcgttctgagcgctccgcaatcatcgtagagatttctggacttcctatattaacaagatttgttaaatctgatttaaaggggttgttagcaatatctttattgtttgggttgtcatagtgaaaaaaaagggtttaggcccctgcaaaaaaaaacagaagaagaagaaaaaaaaagaatagaaaagaaaaaaaaggaaaagaagaagaagggggctgaatctctaaatctgttgtttctctttgtgctgtgctagttgttctttttcagtgactacctttgtgcctaggctcacgtctctagcctggtttagcctaggaccagcacagtaccaccgttgaacgattattcagcttgcttttgtaactaacgtggtactagtgtattccttgcttcagcccacctacaactctacatatttcgactacagtttgacaggtcgtgttgctgcggcaccgatacacttattccacggttgcagacttgttggttgctgacccctcctgttgtgcaaggtaagaattggtaagagcttgtgtggcaggttgagagtgagcgccttgcagtagctacatcctaatagttgtagagtttttattccttcacgttttttttttcttgttgcctctgttcgtctaaccatggcaggattggaggttgatgatgcttctcgtaatatgccacactctcctcgcaccaagggtatcatacaacactttgtaaggctagtgaagacgcacacggaaggtcttgataatgacatgcaggtgacgaatgaaaagatggggcaattggaggccacacagatcgacacaaacaccaaacttgcaaatgtggaaatgacagttgctcatattgacaagagccttgtcgcactcttgaggcggtttgatgagatgcatgctaatatcaatggtgggcgtgatga

SEQ ID NO: 386 - DNA, 3315 bp, Zea mays
  source: /note="Zea mays BAC clone full insert sequence contig Ch4 bacm.pk184.c21.fis13"
tcatttgttcaacatgtgcagcagcatctacatgtggggcgttcgcagcattatgtgaaatcaaatcaataggtgccctagggatgtaaccataaacaatctggaaagggcacatctttgtagaagaatgcgtggcatgattgtaagcaaattcaacatgaggcaagcaatcctcccaacgtctcaaattcttgtctaaaacagccctaagcatggtagataaagttctatttactacctcagtttgtccatcagtctgaggatgacaagtagtgctaaacaacaatttagttcccaatttattccaaagagatctccaaaaatggcttagaaacttagcatcgcgatcagagactattgtttttggaataccatgtaaacgaataatttctctaaagaacaattcagcaacaatgctagcatcatcagttttatgacaaggtataaagtgagccattttagagaatctatcaacaaccacaaaaatactatccctccccttcttagttctaggcaagcccaaaacaaagtccatagagatatcaagccaaggagaagaagggacaggcaaaggcatatacaaaccatggttgttcaaccgtgacttagctttctgacaagtagtgcagcgtgcaacaaggcgctccacatcagcgcgcatccgaggccaaaagaagtgggcagccaacacctcatgcgttttgtagacgccaaaatgccccatgagaccgcctccatgcgcttcctgtaacaacaaaagacgaaccgagctagctggaacacacagcttgttagcgcgaaacaggaacccatcctgtatgtgaaatttgccccatggtatcccattaatacaatggctaaaagcatctttaaaatcagcatcgtcaacatattgatccttcacagtgtccaaaccaaagattttaaaatctaattgtgacagcatggtatagcgacgagataaagcatcagcaataacattgtccttcccgttcttgtgtttaataatgtaaggaaaggactcaatgaattcgacccatttagcatgacgacggttcagatttgtttgggtacgaatatgttttaaagcctcatgatcagaatgaattatgaactcacgatgccaaagatagtgctgccaagtatgcaaagtgcgcactaaagcgtaaagctccttatcataagtagaatatttcagactagcaccgcttaatttttcactaaaataagcaactggttttccttcttgtaacaaaacagcacctagcccaataccgctagcatcgcattcaagctcaaaaactttattaaaatcaggcaattgcaagaggggagcttgggttaacttatctttcaaagtgctgaacgctacctcctgcgaatcactccaagcaaacgacacatctttctttgtaagctcatgtagaggcgctgcaatggagctaaaatcacgaacaaatctgcggtagaaaccggcaagtccaagaaagctccgaatttgtgtgaccgtcgtcggtgtaggccactcccgaatggcagcaatcttgctgctatccacctcaatgccttgcggagtaaccacataaccaagaaacgagacacgttgcgtgcaaaatgtgcacttttccatgttaccaaacaagcgagcaacacacaaagcatcaaaaacagcacgcaaatgttctaaatgctcctctatagacttgctgtaaataaggatatcatcgaaataaacaacaacaaacaaacctatgaaggcccgtaaaacttcgttcattaaacgcataaaggtgctgggagcattagtcaatccaaatggcataaccaaccattcatataaaccaaatttcgttttaaaagccgttttccattcatcaccgagtttcattctaatctgatggtaaccgctacgcaaatcaaccttagagaaaataacggcaccactaagctcatctaacatatcatcaaggtgtggaataggatatcgataacgaactgtgatgttattaatagcacgacaatctacgcacatatgccatgacccatctttctttggaacgagtaaaacaggaaccgagcaaaggctaagagactcacgaatgtaacctttatcaagcagtgtctgcacctggcgctggatctccttcgtctcatctggatttgtacggtacggggcgcggttcggaagagaagcgccggggatgagatcgatctgatgctcaatgccacggaggggaggaagacccggtggtaagtccgtaggataaacatcagcatactcctgcaaaaggttaacaacagcagggggtatatccaaagacggtgcatcatcaagcggaacaagcatgcgcgagcatacaagtgcataacagggcatatgagcttcatggagatcatcaaaatcagcacgtgtagcaagtaaaacaggagagtgcaacttgatttcagatttaataggtgcggctgatgtcgatttgacttgttgtgcagttttagcagccctagtaagatcatctttcaaaatttggtcaggggtcattggatgtataattattttctggcctttaaacatgaaagaataatgatttgaacgaccatgatgtaaactatcagtatcatattgccaaggtcgacccaataacaaagggcatgcttccataggaataacatcgcaatcagcataatcagaataagaacccagcaaaaaggggacacgtaccgaacgtgttacctttattttaccaccatcattaagccattgaatgtgatacagatgtgggtgtgtgcgagtgggcaaggataatttctctaccaacgctgtacttgccaaattgttgcagctgccactatcgatgatgatgcgaatcgaccgttcgtgcacaacgcccttggtatggaatagagtgtgtcgctgattttttcggcctgggcaacctgtgtgctgagaacacgctgcacaacaagactctcatacctatcggcgtcgatgggatcaacgtggacttcctcattttctgcatggttagtggcaatcatagcatgactagtttcctcagaatcactggctgaagagtactcaccattgtcacgtataagcaaggtacgcttgtttgggcagtcccgaatcatgtgcccaaaccctctgcaacgatggcactgaatatcccgtgtacgtcctgtggaagaagcggcgcctttggcagggggcgctactggcttggtcgtccctgtgcgcgatgtagtgctaggcgtagaaggtgcagggctggaaggagttgagctgtgtgttggaccccgaccagagaaaagagttag

SEQ ID NO: 387 - DNA, 4575 bp, Zea mays
  source: /note="Zea mays BAC clone full insert sequence contig Ch4 bacm.pk184.c21.fis14"
gaaaagcgtgcgagaactttgacgaatttttttctttattttcctgaatttttttgacaattttgtcgaaccccaaacagaccataggtgagtttggccagcctcagaatggtgtcaacaagctcctgtaaaaatttcagatttttttggacacccgagcgaaaagttatgcccggtttacggaaggttcctcaagttatgttttaaaaacgaccgggatgaaacaaccgtatcctttctccttcgttttcttttttttgtttctgtttttttatgtaaccgaaggagaaaaacaaggaagcggtcgttgactcagtttgtttttttctgtttttttttcgtaaccgaaggagaaaatcaaggaaacagccgttgactcgatttgttttttctgttttttttacgtaaccgaaggagaaaaacaaggaaacaatgttgactcggtttgtggcatgatcaaacgggagatggtggcggcgctagggtttgaatggtggaagaacacaatgcaaccaacaacaaatgacgcgaaagcacacaaattcaacaatgcagattattgaaagaaagtgcgaggctcaaaagggtgctgggataagatctaacctgaatttttatgtggatttgtggactgtaggaaaaaaatgctcgataaactcaccgatcaacctggaaatctgataccaattgatgtaggtgaggtgcccgatctttcggcgagttgagataattccgatttggcggaagatgacccttgcgatccgactacgacgagcaagcccgaggcgccaatgcaatcgctgaaccaactccctgtggttaccgaccttgctgatgcgagatcggcctgatcacaaagatcgtttcctgtgcgcaatcgaagaacgaacaagaaaaagatgcgagcaatctaatctattactcgagggtggagttctgaatacacgaagacagcgcagatttgcgcgtgttcgagagtagctaaggctaacgtaaaacaaaactccaaaataaaggagacgcagctcctggataaatagagggggcgcagcccctaggggcggccaaccctaggtcgtccactatgggccgcagttgggctggtcgtctattcttctgggccctcattcttcagtagcatgacgaagttaagatctctggcacgggcccaagtgattggcccagctaatgaaggaagtggcgcttgatgtggaggtgctgctggtgtagtcgtactcatagtgatgtcctcatcactgctggtgtagtcgtactcatagtgatgtctgatgtagctgaggtgcccgatctttcggcgagtagagataattccgatttggcggaagatgacccttgcgatccgactacgacgagcaagcccgaggcgccaatgcaatcgctgaaccaactccctgtggttaccgaccttgctgatgcgagatcggcctgatcacgaagatcgtttcctgtgcgcaatcgaagaacgaacaagaaaaagaggcgagcaatctaatctattactcgagggtggagttctgaatacacgaagacagcgcagatttgcgcgtgttcgagagtagctaaggctaacgtaaaacaaaactcgggaaataaaggaggcgcagctcctgaataaatagagaggggcggccaaccctaggtcgtccattatggaccgcaattgggctggtcgtctattcttccgggccttcgttctttaacaacgtgatgtagttcaagtctcttgcacgggcccgagtcactggcccaggtggaaggggtggcgcctgggctagagaaggtgctgctggtgtagatgtgctcgtgttggtgttgatgtccgcatcatcctccccttcttgaactgaagtcgtcctcgacggcaactcctcatcttctcccgcatacggtttcaaatctgcaacattaaaactagtggaaacaccaaactccgcaggcaggtcaaggatataagcattatcattaatcttggttagtaccttaaaaggaccagcagcacgaggcatcaatttagaacggcgcaaagtaggaaaacgatcctttcttaaatgcaaccaaaccatatcaccaggttcaaaagtaacatgttttcttcctttactaccagcaacctgattttttgcattagtagcagcaatgttctgtttcgtttgttcatgtatggtaatcatttgttcaacatgtgccgaagcatctacatgtggggcgttcgcagcattaagtgaaatcaaatcaataggtgccctaggaatgtaaccataaacaatctggaaagggcacatctttgtagaagaatgcgtggcatgattgtaagcaaattcaacatgaggcaagcaatcctcccaacgtctcaaattcttgtctaaaacagccctaagcatggtagataatgttctatttactacctcagtttgtccatcagtctgagggtgacaagtagtgctaaacaacaatttagttcccaatttattccaaagagatctccaaaaatggcttagaaacttagcatcgcgatcagagactattgtttttggaataccatgtaaacgaataatttctctaaagaacaattcagcaacaatgctagcatcatcagttttatgacaaggtataaagtgagccattttagagaatctatcaacaaccacaaaaatactatccctccccttcttagttctaggcaagcccaaaacaaagtccatagagatatcaagccaaggagaagaagggacatgcaaaggcatatacaaaccatggttgttcaaccgtgacttagctttctgacaagtagtgcagcgtgcaacaaggcgctcaacatcagcgcgcatccgaggccaaaataagtgggcagccaacacctcatgtgttttgtagacgccaaaatgccccatgagaccgcctccatgtgcctcctgtaacaacaaaagacgaaccgaactagctggaacacacagcttattagcgcgaaacaggaacccatcctgtatgtgaaatttgccccatggtatcccattaatacaatggccgaaagcatctttaaaatcagcatcgtcaacatattgatccttcagagtgtccaaaccaaagattttaaaatctaattgtgacagcatggtatagcgacgagacaaagcatcagcaataacattgtccttcccgttcttgtgtttaataatgtaaggaaaggactcaatgaattcgacccatttagcatgacgacggttcagatttgtttgggtacgaatatgttttaaagcctcatgatcagaatgaattatgaactcacgatgccaaagatagtgctgccatgtatgcaaagtgcgcactaaagcgtaaagctccttatcataagtagaatatttcagactagcaccgcttaatttttcactaaaataagcaactggttttccttcttgtaacaaaacagcacctagcccaataccgctagcatcgcattcaagctcaaaaactttattaaaatcaggcaattgcaagaggggagcttgggttaacttatctttcaaagtgctgaacgctacctcctgcgaatcactccaagcaaacggcacatctttctttgtaagctcatgtagaggcgctgcaatggagctaaaatcacgaacaaatctgcggtagaaaccggcaagtccaagaaagctccgaatctgtgtgaccgtcgtcggtgtaggccactcccgaatggcagcaatcttgctgctatccacctcaatgccctgcggagtaaccacataaccaagaaacgagacacgttgcgtgcaaaatgtgcacttttccatgttaccaaacaagcgagcagcacgcaaagcatcaaaaacagcacgcaaatgttctaaatgctcctctatagacttgctgtaaataaggatatcatcgaaataaacaacaacaaacaaacctatgaaggcccatagaacttcgttcattaaacgcataaaggtgctgggagcattagtcaatccaaatggcataaccaaccattcatataaaccaaatttcgttttaaaagccgttttccattcatcaccgagtttcattctaatctgatggtaaccgctacgcaaatcaaccttagagaaaataacggcaccactaagctcatctaacatatcatcaaggcgtggaataggatatcgataacgaactgtgatgttattaatagcacgacaatctacgcacatacaccatgacccatcttactttggaacgagtaaaacaggaaccgagcaagggctaagagactcacgaatgtaatccttatcaagcagcgtctgcacctggtgctggatctccttcgtctcctctggatttgtacggtacggggcgcggttcggaagagaagcgccggggatgagatcgatctgatgctcaatgccacggaggggaggaagacccggtggtaagtccgtaggataaacatcagcatactcctgcaaaaggttaacaacagcagggggtatatccaaagacggtgcatcatcaagcggaacaagcatgcgcgagcatacaagtgcataacagggcatatgagcttca

SEQ ID NO: 388 - DNA, 5175 bp, Zea mays
  source: /note="Zea mays BAC clone full insert sequence contig Ch4 bacm.pk184.c21.fis15"
ctgctgcacatgttgaacaaatgattaccatacatgaacaaacgaaacagaacattgctgctactaatgcaaaaaatcaggttgctggtagtaaaggaagaaaacatgttacttttgagccaggtgatatggtttggttgcacttgagaaaggatcggtttcctactttgcgccgttctaaattaatgcctcgtgctgctggtccttttaaggtgctaacaaagattaatgataatgcttatatccttgacctgcctgcggaatttggtgtttccactagttttaatgttgcagatttgaaaccatatatggccgaggatgagttgtcgtcgaggacgacttcacttcaagaaggggaggatgatgaggacatcactatgagtacgactacaccagcagcacctccacatcaagcgccacttccttcattagctgggccaatcactcgggcccgtgccagagatcttaacttcgtcatactactgaagaatgagggcccagaagaatagacgaccagcccaactgcggcccatagtggacgacctagggttgaccgcccctaggggctgcgccccctctatttatccaggagctgcgcctcctttattttcgagttttgttttatgttagccttagctactctcgaacacgcgcaaatctgcgctgtcttcgtgtattcagaactccaccatcgagtaatagattagattgctcgcatctttttcttgttcgttcttcgattgcgcacaggaaacgatcttcgtgatcaggccgatctcgcatcagcaaggtcggtaaccacagggagttggttcagcgattgcattggcgcctcgggcttgctcgtcgtagtcggatcgcaagggtcatcttccgccaaatcagaattatctctactcgccgaaagatcgggcacctcagctacatcatactcaccattttctcttataattagcacacacttgcttgggcaatcccttcggatgtgcccaaatcctttgcattagaggcattggatgtcctttgttcttcccgtggaagcaatagaagaagatttggttacagcttgggaggatcctttccctgtctcaatagcacgagaagatgcggatttcgatggtgttgtggatgatctattggaagcatctccctgaaacacatggttagagctagcagcactagtgtggggctgccaagatgtattgcgacctgcataagtgttagttctcaagcatcgtccctggacttctctttcagccttacaagcaagatgaaataagcgagtaacattagtgtattccttgtaagctaatatatcttgaatttctcttgtcaaaccacccatgaacctagccattgcagcttcttcattttctacgagaccacacctcaacatgcctatttgtaattgttgataatactcttcaacagatttgttgccttgtctaagctgttgtaatttatgtaataaatcacgagcatgataggaaggaacaaaacgactacgcatgattctttttaaagcattccaagtttgtggtatggtacctggatgtgtagtttggtactcatgccaccaaatagaagcaaaatcagtgaattcactcgtagcagctctaacctttttatcatcagaaaaatcatagcttgcaaatttttgatctaccgacaattcccatgttagatatgcatcaggatcatattttccatcaaacggtggtatggagaatttaattcttcctagagaatcatcattttcacgtatctcacgtcgtggaggtcgaccacccaagccatggcgatcacgtcgttggtgtcgtcggtgcctaatagatcggtcatcacgctcggtgtctgctgaatactccgtagcatcatctcttgcggtaccagcaatggaaccatggccatcatcatcaccttgttgcctaccttcacgcccaacttggtccatcctatctaagcgctcaataattgctgcaagagaggtgttagtagcagcaactgttcgttccaaagtggtcaatgtgttgttggtaacaatttgtgctgtttctaattgaccaatgcgctcattggtgacttcaacatcttcattgagggcatatgtgtgcaaccttacttgacgttcgaaatgttgaatgatgcccactgttcgtggagaatgtggaggtcgcgcatttgcatcctctgccatggttagtgcaaaagagatacaaaaacaagtaatgcagcctagtagttgctatgatatggaaggataaaaactgcctcactagcaagaaatcaagctcttacaagttctcaccacgcaaagcaagtggcgctggcaaacagcaagaagaacaataacagtggctgctagcacaacctggtggtgttgtagaaaaaattgtggatttataggtggctgctaaaacaatagttccaaggaatagctagtaccacgttagccacaacaagttgaataaacgttccacaatggtgctgtgctggtcctagtctaaaccgtaatagagacgcgagccgttacacaaatgatatcaccaaatactcaaaacagcaagctgacttataaaattgtgaaacggtggcacacaaactgtctttgatttgctgcacatggaattttatctaccaatattcttactgcgattttttctcttttttggacgtgcttttttttatgatcagcgcggctttttttctgcacttgccttttcctttcccttgttttttttgaactacagctagagaactaaaaatggtgatctaaacaagatggcgcgaactcgaaactctagcagcaagaaactttggaccagcaactcgacacaaatgcagcaaccgtgaattcaacaagtcaaaaaccaagtagtaaagcaaaggctcaaaatgtttttaggtgattttctgctctaaatatatctttggcaaaagtggactgtaggtaaataaaataaggaagatggagatctctcaccgagcaacctgaaatttgataccacatgatgaacccaacgggtagaagggtgcctgatctttcgatgagagatgatggaggtggaaaacttgttggagaacgacgttggctgcccgactaccacaaccaagatggtgttgcgccttgagcgacaggtacaccgtctcctgataactacgatttagtgtggaggtcgacgttgtgctatccgactacaaccaccacaagggtgctgcgccttagcgatagttacaccggctcctattgttgctgctcttgccgtgccaagaatagccttgaacctgcaagcaatcgagaacaagcaagaacaagataacaagcaaacacgcacggatctgataaagttggggtcccgtttcaagtattcgggtggtctagccgacacacgtgtttacaaggaagtagcaaaggctaaacttacatcaaacaaaacccaagttctttggtggctgctagttgcttaaatagagaaataggaagaaggaattctggtggagtcatgaagttccctcggcagttcctggacgcctcgggtgtagtctcccattaattcttgatccaccagcaagtagacgaaaggagctttccaacaagtatttatttccattaaacggccttggaagttggaagatatgccccatttaaacttgtacttggtgctgttacgaaatcctttcgggtgcagcagcctttattgccttgttgccttctccagtccaagatggttcacctcccaaacacctgagcataataaagtcatcgcaaggctttagtacctcatttaaagaagaattagcttcaatagcaaggaacgagttcacctgataattaagtttacgtgcacgggctcgtgtcattggtccttgattagctacgaatggtgaagtggtcactggtatggttgtatcaatgatagtgatgtcctcatcagcttgtaaggctgaaagagaagtccagggacgatgctttagaactaacacttatgcaggtcgcaatacatcttggcagtcccgcactagtgctgctagctctaaccatgtgtttcagggagatgcttccaatagatcatccacaacaccatcgaaatcagcaccttctcgtgctattgagacagggaaaggatcctcccaagctgtagccaaatcttcttctattgcttccacgggaagaacaaaggacatccaatgcctccaatgcaaagaatttggtcacatccgaagggattgcccaagcaagcgtgtgctaattataagagaaaatggtgagtactgcgatttagataatgatacatatgccatgcttgctggccaagatgctgaaaaggagaatgatgatgaagagcatattgaggctgaacgtgctgaacactatgagagcctcattgtaagacgtgtcttgagtgcccaaattattaaagctgaacaaaaccagcgacacaatttcttccaaactaaatgtgtagttttggaacgatcttgtcgtattataattgatggaggaagctgcaacaacttagcaagcaccaccatggtagagaagcttgggctgaaaacgcttctgatgtagctgaggtgcccgatctttcggcgagtagagataattccgatttggcggaagttgacccttgcgatccgactacgacgagcaagcccgaggcgccaatgcaatcgctgaaccaactccctgtggttaccgaccttgctgatgcgagatcggcctgatcacgaagatcgtttcctgtgcgcaatcgaagaacgaacaagaaaaagatgcgagcaatctaatctattactcgagggtggagttctgaatacatgaagacagcgcagatttgcgcgtgttcgagagtagctaaagctaacgtaaaacaaaactcggaaaataaaggaggcgcagctcctgtataaatagagagggggcgcagcccctaggggcggccaaccctaggtcgtccattatgggccgcaattgggctggtcgtctattcttccgggccttcgttctttaacgacatgatgtagttcaattctcttgcacgggcccgagtcactggcccagggtggaaaggggtggcgcctggactggggaagatggtgcctgggctggagaaagtgctgctggtgtagatgtgctcgtgttggtgttgatgtcctcatcaacgagcgcttcgt

SEQ ID NO: 389 - DNA, 4807 bp, Zea mays
  source: /note="Zea mays BAC clone full insert sequence contig Ch4 bacm.pk184.c21.fis16"
aggccagaaaataattatacatccaatgacccctgaccaaattttgaaagatgatcttactagggctgctaaaactgcacaacaagtcaaatcgacatcagccgcacctattaaatctgaaatcaagttgcactctcctgttttacttgctacacgtgctgattttgatgatctccatgaagctcatatgccctgttatgcacttgtatgctcgcgaatgcttgttccgcttgatgatgcaccgtctttggatataccccctgctgttgataaccttttgcaggagtatgctgatgtttatcctatggacttaccaccgggtctccctcccctccgtggcattgagcatcagatcgatctcatccccggcgcttctcttccgaaccgcgccccgtaccgtacaaatccagatgagacgaaggagatccagcgccaggtgcagacgctgcttgataagggttacattcgtgagtctcttagcccttgctcggttcctgttttactcgttccaaagaaagatgggtcatggcgtatgtgcgtagattgtcgtgctattaataacatcacagttcgttatcgatatcctattccacgccttgatgatatgctagatgagcttagtggtgccgttattttctctaaggttgatttgcgtagcggttaccatcagattagaatgaaactcggtgatgaatggaaaacggcttttaaaacaaaatttggtttatatgaatggttggttatgccatttggattgactaatgctcccagcacctttatgcgtttaatgaacgaagttctacgggccttcataggtttgtttgttgttgtttatttcgatgatatccttatttacagcaagtctatagaggagcatttagaacatttgcgtgctgtttttgacgctttgcgtgctgctcgcttgtttggtaacatggaaaagtgcacattttgcacgcaacgtgtctcgtttcttggttatgtggttactccgcagggcattgaggtggatagcagcaagattgctgccattcgggagtggcctacaccgacgacggtcacacaaattcggagctttcttggacttgccggtttctaccgcagatttgttcgtgattttagctccattgcagcgcctctacatgagcttacaaagaaagatgtgccgtttgcttggagtgattcgcaggaggtagcgttaagcactttgaaagataagttaacccaagctcccctcttgcaattgcctgattttaataaagtttttgagcttgaatgcgatgctagcggtattgggctaggtgctgttttgttacaagaaggaaaaccagttgcttattttagtgaaaaattaagcggtgctagtctgaaatattctacttatgataaggagctttacgctttagtgcgcactttgcatacttggcagcactatctttggcatcgtgagttcataatttattctgatcatgaggctttaaaacatattcgtacccaaacaaatctgaaccgtcgtcatgctaaatgggtcgaattcattgagtcctttccttacattattaaacacaagaacgggaaggacaatgttattgctgatgctttgtctcgtcgctataccatgctgtcacaattagattttaaaatctttggtttggacactatgaaggatcaatatgttgacgatgctgattttaaagatgctttcggccattgtattaatgggataccatggggcaaatttcacatacaggatgggttcctgtttcgcgctaacaagctgtgtgttccagctagctcggttcgtcttttgttgttacaggaagcgcatggaggcggtctcatggggcattttggcgtctacaaaacgcatgaggtgttggctgcccatttcttttggcctcggatgcgcgctgatgtggagcgccttgttgcacgctgcactacttgtcagaaagctaagtcacggttgaacaaccatggtttgtatatgcctttgcctgtcccttcttctccttggcttgatatctctatggactttgttttgggcttgcctagaactaagaaggggagggatagtatttttgtggttgttgatagattctctaaaatggctcactttataccttgtcataaaactgatgatgctagcattgttgctgaattgttctttagagaaattattcgtttacatggtattccaaaaacaatagtctctgatcgcgatgctaagtttctaagccatttttggagatctctttggaataaattgggaactaaattgttgtttagcactacttgtcaccctcagactgatggacaaactgaggtagtaaatagaactttatctaccatgcttagggctgttttagacaagaatttgagacgttgggaggattgcttgcctcatgttgaatttgcttacaatcatgccacgcattcttctacaaagatgtgccctttccagattgtttatggttacatccctagggcacctattgatttgatttcacttaatgctgcgaacgccccacatgtagatgctgctgcacatgttgaacaaatgattaccatacatgaacaaacgaaacagaacattgctgctactaatgctaaaaatcaggttgctggtagtaaaggaagaaaacatgttacttttgagcccagtgatatggtttggttgcacttgagaaaggatcggtttcctactttgcgtagttctaaattaatgcctcgtgctgctggtccttttaaggtgctaacaaagattaataataatgcttatatccttgacctgcctgcggaatttggtgtttccactagttttaatgttgcagatttgaaaccatatatggccgaggatgaggagttgtcgtcgaggacgacttcacttcaagaaggggaggatgatgaggacatcactatgagtacgacaccagcagcactcgagcccgtgccacttccttcattagctgggccaccatctcccctttgatcacgccacaaaccgagtcaacattgtttccttgtttttctccttcggttacgtcaaaaaaaaaacagaaaaaacaaaccgagtcaacgtccgtttccttgtttttctccttcggttacgaaaaaaaacagaaaaaaaaaccgaggcaacatcgtttccttgtttttctccttcggttacgtcaaaaaaaaaacagaaacaaaaaaaacaacgaaggagaaaggatacggttgtttcatcccggtcgtttgaaaacataacttgaggtaccttccttaaaccgggcataacttttcgctcgggtgtccgaaaaatctgaaatttttacaggagctagatgacaccattctgaggccggccaaactcaccttcggtctgtttgggttcgacaaaattgtcaaaaaaattcaggaaaataaagaaaaaaatccgtcaaagttctcgcacgcttttcagagaactttctgattttctgtagaccacatttgaactctgttttaggtgaaacttcgtgtagctcctattttgttgcttcttgtgctgagaaaaatatcaaaaaaatcatacaaaaaagaaaaacaaaatcacttgtgattcctactagtggtctcgctagtacaatatttacggtactgccattctgctagttccatccgtcctttgcacttgtggccagcaatatagtttcgtgttttgcactataattcaactttgcattattgtttggtcgtgctaatccttgacttgagtgcagcctacccagaactccacatatttctacgacgagtaggtttctgtttctccaggcaatcgctcatccaatctttcaccggttccacctgttggttgcagttcaccactgtggcttggtaagaacggataagaatttgataacagcactagtgtgagcgccttgtgagcagtacacccctgtttttgtcgtttttttggtgtttgcgctaactatggcaggagcacatgacacggtggatgcccagttgctggaagtaaagggacaagttgatggacttgctgatgacattaggatgatgcatgaacggcttgattcaacggtcacttcgacgaccgagcgtttcaaccagcttgaccttgctcaaacggcgactcgcaccacactcgacaccatcctggcacgccttgatgcgttgaccacaaagatggagcaggactacggcggtgacactgagtgggacgatggagatcgccgtggtcgtgcacgccgtgtggttcgtcatccccctaatgacttattttctaagattaaatttaaaattccaccttttaatggcaaatatgatcctgctgcatatcttgattgggagttagaggttgaacaaaaattttcatgccatgatattgctgcacattctcaggttaaagctgctattagtgaatttactgattttgctttaatttggtggcgtgagtttaaaataaaacatcccactaccattccaaccacttgggatcagttgaaagctgcgatgcgacatcgatttgtgccttcgtattatgctcgtgatttgcttaataaaatgcagcgttttcagcaaggttctcaatctgttgaggactatttccaggagttacaaaaaggtatgattcgttgtgggatattggaggacaacgacgctgctatggcacgttttcgtggtggtttaaaccgcgaaatccaagatatacttgattataaggaatattatgatatgactactttatttgaatatgcttgcaaagctgaacgtgaagtgcagggacgccgctcgaagcaatattctaacccttttgcaggac

SEQ ID NO: 390 - DNA, 4035 bp, Zea mays
  source: /note="Zea mays BAC clone full insert sequence contig Ch4 bacm.pk184.c21.fis17"
ccgaacgcgcagcaatattctaacccttttgcaggacgaagctcgacatccacctcagcaccagttccccctgcgccatccacgtccaccactactccacgcgagaagacgaccaaaccagccagcgctgccccacccacaggtcgtacacgggatattcagtgtcatcgctgtagaggatttggccatgtgattcgggactgcccaaacaagcgcactttactcattcgtgacgatggtgagtactcttccgctagtgattctgaagaaattgaacatgcactacttgccactgaccatgcagctaaggcggaggtacatgtcaacccgggcgacgctgataggtatgaaagtcttgttgtgcagcgtgttctcagtacacaggtcgctttgcccgagaagaatcagcgacacactctgttccatacaaagggtgttgtgcaggagcggtcaattcgcatcattatcgacagcggcagttgcaacaatttggcgagtaccatgctggtcgaaaagttgtcgttacccactcgtaagcatccaaacccatatcacattcaatggcttaatgatggtggtaaaataaaaatcacgcgttccgtgcgagttcctttctccatgggtgcttattctgattttgttgattgtgatgttattcccatggaagcatgctttttgttacttggtcgaccttggcaatatgatactaatagcttgcatcatggtcgttcgaatcattattctttcatttttaagggtcagaaaataattatacatccaatgacacctgaacaaattgttaaagatgatcttgcccgagctgctataactgctaaacaacttgatccatcgccctctgttccttctgaaattaagttgaaggctcctgttttacttgctacacgtgctgattttgatgatctacacggtgctcatttgccatgctatgcacttgtatgctctagtgtcctcatttcacttgatgatgcaccatctttggctattccccctatggttgctaaccttttgcaggagtacgctgatgtctttcccaaagacttaccaccgggtctcccaccgcttcgtggcattgagcaccagatcgacctcattcccggtgcacagcttccaaaccgcgcaccataccgtacaaatccggatgagacgaaggagattcagcgccaggtacaggcgttgcttgacaaaggatacattcgtgagtctcttagcccttgctctgttcctgtgttacttgttcccaagaaggatgggtcatggcgtatgtgtgtagactgtcgtgctattaataatatcactattcgttatcgctatcctataccacgccttgatgatatgctagatgagcttagtggtgccattatttttacgtagtggttaccaccagattagaatgaaactgggtgatgaatggaaaacagccttcaaaacgaaatttggtttatatgaatggttggttatgccgtttggattgactaatgctcccagcacttttatgcgagtgatgaatgaagttctgaggcccttcataggattgtttgtggttgtttatttcgatgatatccttatttacagcaaatctaagaaagagcatttggaacatttaagtgctgtttttgatgcattgcgtgccgcccagttattcgctaacatggaaaaatgcatcttttgcacacgacgtgtctcgtttcttggttatgttgttactccacagggcattgaggtggatagcagcaagattgctgccattcgggagtggcctacaccgacgacggtcacacaaattcggagctttcttggacttgccggtttctaccgcagatttgttcgtgattttagctccattgcagcgcctctacatgagcttacaaagaaagatgtgccatttgcttggagtgattcgcaggaggaagcgttcagcactttgaaagataagttaacccaagctcccctattgcaattgcctgattttaatacagtatttgagcttgaatgcgatgctagcggtattgggctaggtgctgttttattacaagaaggaaaaccagttgcttattttagtgaaaaattaagcggtgctagtctgaaatattctacttatgataaggagctttacgcgttagtgcgcactttacatacatggcagcactatctttggcatcgtgagttcataattcattctgatcatgaggctttaaaacatattcgtacccaaacaaatctgaaccgtcgtcatgctaaatgggtcgaattcattgagtcttttccttacattattaaacacaagaacgggaaggacaatgttattgctgatgctttgtctcgtcgctataccatgctgtcacagttagattttaaaatctttggtttgcacactgtaaaagatcaatatgttgacgatgctgattttaaagatgctttcggccattgtattaatgggaaaccatggggcaaatttcacatacaggatgggttcctgtttcgcgctaacaagctgtgtgttccagctagctcggttcgtcttttgttgttacaggaagcacatggaggcggtctcatggggcactttggcgtctacaagacacatgaggtgttggctgcccacttcttttggcctcggatgcgcgctgatgttgagcgccttgttgcacgctgcactacttgtcagaaagctaagtcacggttgaacaaccatggtttgtatatgcctttgcctgttcctacttccccttggattgatatttcgatggattttgttttgggattgcctagaactaagaaggggagggatagcatttttgtggttgttgatcgattctccaaaatggctcatttcataccttgtcataagactgatgatgctagcaatgttgctgaattgttttttagagagattattcgtttgcacggtattcccaatacaatagtctcggatcgtgatgccaagtttctgagtcatttttggagatctctgtggaataaattaggaactaaattgctgtttagcaccacttgtcaccctcagactgatggtcaaactgaggtagttaatcgaactctgtctaccatgcttagggctgttttatacaaaaatttgaaacgttgggaggattgcttacctcatgttgagtttgcttataatcatgcaacacattcttctacaaagatgtgcccttttcaaattgtttatggttacattcctagggcgcctattgctttgttttcgcttgatgctacggacgccccacacatagatgctcttgcacatgttgaacaaatgattaatctccatgaacaaactcaacaaaacattgctgctgctaatgctaaatatcagattactggtagtaaaggctggaaactagttacttttgaacctggtgatatggtttggttgcatttgagaaaggatcgttttcctactttgcgccgttctaaattgatgcctcgtgctgctggtccttttaaggtactaaccaagattaatgataatgcttatatccttgacctgcctgcggagtttggtgtttccactagttttaatgttgcagatttgaaaccgtatgcgggagaagatgaggagttgccgtcgaggacgacttcagttcaagaaggggaggatgatgaggacatcaacaccaacacgagcacatctacaccagcagcaccttctccagcccaggcaccatcttccccagtccaggcgccaccccttccacctgggccagtgactcgggcccgtgcaagagaattgaactacatcatgttgttaaagaacgaaggcccggaagaatagacgaccagcccaattgcggcccataatggacgacctagggttggccgcccctaggggctgcgccccctctctatttatacaggagctgcgcctcctttattttccgagttttgttgataccaattgatgtagctgaggtgcccgatctttcagcgagtagagataattccgatttggcggaagttgacccttgcgatccgactacgacgagcatccttcgg

SEQ ID NO: 391 - DNA, 6463 bp, Zea mays
  source: /note="Zea mays BAC clone full insert sequence contig Ch4 bacm.pk184.c21.fis18"
ttaggtgaaacttcgtgtagctcctatcttgttgcttcttgtgctgagaaaaatatcaaaaaattcatacaaaaaagaaaaacaaaatcacctgtgatttctactagtgcctttttggcatcactagttcaatattacggtactgccattctgttagtttcatccatcctttgcacctgtggccagcaatatagtttcgtgttttgcactataattcaactttgcattattgtttgatcgtgctaatccttgacttgagtgcagcctacccacaactccacatatttctacgacgagcaggtttctgtttctccacgcaatcgctcatccaatctttcaccggttccacctgttggttgcagttcaccactgtggcttggtaagaacggataagaacttgataacagcactagtgtgagcaccttgtgagcagtacacccatgtttttgtcgttggtttttctccttttggtgtttgcgctaactatggcaggagcacacgacatggtggatgcccagttgcaggaagtaaggggacaagttgatggacttgctgctgacattaggacgatgcatgaacggcttgattcaacgatcacttcgacgaccgagcgtttcaaccaacttgaccttgctcaaacggcgactcgcaccacacttgacaccatcctggcacgccttgatgcattgaccacaaagatggagcaggaatacggcggtgacactgagcaggacgatggagatcgccgtggtcgtgcacgtcgtgtggttcttcatccccctaatgacttattttctaagattaaatttaaaattccatcttttaatggtaaatatgatcctgctgcatatcttgattgggaattagaggtagaacagaaattttcatgccatgatattcctgctaatagcctagtgaaggctgccattagtgaatttactgattttgctttaatttggtggcgtgagtataaacaaaaacttcccattaacagtgtcattacttggacccaattaaaaactgccatgtgccacagatttgttccttcctattatgctcgtgatttgcttaacaaaatgcagcgttttcaacaagtttcacagtctattgaggaatattaccaggagttacaaaagggtatgctttgttgtggtttagttgagtcaacgctgctatggcgcgttttcgtggtggtttgaacagggaaattcaggatatacttgattataaggattattttgatataaccacattgtttgaatatgcttgcaaagctgaacgtgaagtgcagggacgacgatcaaagacatatactaactctcttgcaggccgggtccaacacacaactcaactccttccagccctgcaccttctacgcctagcactacatcgcgcacagggacgaccaagccaatggcgctccctgccaaaggcgccgcttcttccacaggacgtacacgggatattcagtgccatcgttgcagagggtttgggcatatgattggggactgcccaaacaagcgtaccttgcttatacgtgacaatggtgagtactcttcagccagtgattcagaggaaactagtcatgctatgattgccactaaccatgcagaaaatgaggaagtccacgttgatcccatcgacgccgataggtatgagagtcttgttgtgcagcgtgttctcagcacacaggttgcccaggccgaaaaaaatcagcgacacactctattccataccaagggcgtcgtgcacgaacggtcgattcgcatcatcatcgatagtggcagctgcaacaatttggcaagtatagcgttggtagagaaattatccttgcccactcacacacatccacatccgtatcacattcaatggcttaatgatggtggtaaaataaaggtaacacgttcggtacgtgtccccttttcgctgggttcttattctgattatgctgattgcgatgttattcttatggaagcatgctctttgttattgggtcgaccttggcaatatgatactgatagtttacatcatggtcgttcaaatcattattctttcatgtttaaaggccagaaaataattatacatccaatgacccctgaccaaattttgaaagatgatcttactagggctgctaaaactgcacaacaagtcaaatcgacatcagccgcacctattaaatctgaaatcaagttgcactctcctgttttacttgctacacgtgctgattttgatgatctccatgaagctcatatgccctgttatgcacttgtatgctcgcgcatgcttgttcggcttgatgatgcaccgtctttggatataccccctgctgttgttaaccttttgcaggagtatgctgatgtttatcctacggacttaccaccgggtcttcctcccctccgtggcattgagcatcagatcgatctcatccccggcgcttctcttccgaaccgctccccgtaccgtacaaatccagatgagacgaaggagatccagcgccaggtgcagacgctgcttgataagggttacattcgtgagtctcttagcccttgctcggttcctgttttactcgttccaaagaaagatgggtcatggcgtatgtgcgtagattgtcgtgctattaataacatcacagttcgttatagatatcctattccacgccttgatgatatgttagatgagcttagtggtgccgttattttctctaaggttgatttgcgtagcggttaccatcagattagaatgaaactcggtgatgaatggaaaacggtttttttaaacgaaatttggtttatatgaatggttggttatgccatttggattgactaatgctcccagcacctttatgcgtttaatgaacgaagttctacgggccttcataggtttgtttgttgttgtttatttcgatgatatccttatttacagcaagtctatagaggagcatttagaacatttgcgtgctgtttttgatgctttgcgtgctgctcgcttgtttggtaacatggaaaagtgcacattttgcacgcaacgtgtctcgtttcttggttatgtggttactccgcagggcattgaggtagatagcagcaagattgctgccattcgggagtggcctacaccgacgacggtcacacaaattcggagctttcttggacttgccggtttctaccgcagatttgttcgtgattttagctccattgcagcgcctctacatgagcttacaaagaaagatgtgccgtttgcttggagtgattcgcaggaggtagcgttcagcactttgaaagataagttaacccaagctcccctattgcaattgcctgattttaataaagtttttgagcttgaatgcgatgctagcggtattgggctaggtgctgttttgttacaagaaggaaaaccagttgcatattttagtgaaaaattaagcggtgctagtctgaaatattctacttatgataaggagctttacgctttagtgcgcactttgcatacatggcagcactatctttggcatcgtgagttcataattcattctgatcatgaggctttaaaacatattcgtacccaaacaaatctgaaccgtcgtcatgctaaatgggtcgaattcattgagttctttccttacattattaaacacaagaacgggaaggacaatgttattgctgatgctttgtctcgtcgctataccatgctgtcacaattagattttaaaatctttggtttggacactgtgaaggatcaatatgttgacgatgctgattttaaagatgctttcggccattgtattaatgggataccatggggcaaatttcacatacaggatgggttcctgtttcgcgctaacaagctgtgtgttccagctagttcggttcgtcttttgttgttacaggaggcacatggaggcggtctcatggggcattttggcgtctacaaagcgcatgaggtgttggctgcccacttcttttggcctcggatgcgcgctgatgttgagcgccttgttgcacgctgcactacttgtcagaaagctacgtcatggttgaacaaccatggtttgtatatgcctttgcctgtcccttcttctccttggcttgatatctctatggactttgttttgggcttgcctagaactaagaaggggagggatagtatttttgtggttgttgatagattctctaaaatggctcactttataccttgtcataaaactgatgatgctagcattgttgctgaattgttctttagagaaattattcgtttacatggtattccaaaaacaatagtctctgatcgcgatgctaagtttctaagccatttttggagatctctttggaataaattgggaactaaattgttatttagcactacttgtcatcctcagactgatggacaaactgaggtagtaaatagaactttatctaccatgcttagggctgttttagacaagaatttgagacgttgggaggattgcttgcctcatgttgaatttgcttacaatcatgccacacattcttctacaaagatgtgccctttccagattgtttatggttacattcctagggcacctattgatttgatttcacttaatgctgcgaacgccccacatgtagatgcttctgcacatgttgaacaaatgattaccatacatgaacaaacgaaacagaacattgctgctactaatgcaaaaaatcaggttgctggtagtaaaggaagaaaacatgttacttttgagccaggtgatatggtttggttgcacttgagaaaggatcggtttcctactttgcgccgttctaaattaatgcctcgtgctgctggtccttttaaggtgctaacaaagattaatgataatgcttatatccttgacctgcctgcggaatttggtgtttccactagttttaatgttgcagatttgaaaccatatatggccgaggatgaggagttgtcgtcgaggacgacttcacttcaagaaggggaggatgatgaggacatcactatgagtacgactacaccagcagcacctccacatcaagcgccacttccttcattagctgggccaatcactcgggcccgtgccagagatcttaacttcgtcatgctactgaagaatgagggcccagaagaatagacgaccagcccaactgcggcccatagtggacgacctagggttggccgcccctaggggctgcgccccctctatttatctaggagctgcgtctcctttattttggagttttgttttacgttaggcttagctactctcgaacacgcgcaaatctgcgctgtcttcgtgtattcagaactccaccctcgagtaatagattagattgctcgtatctttttcttgttcgttcttcgattgcgcacaggaaacgatcttcgtgatcaggccgatctcgcatcagcaaggtcggtaaccacagggagttggttcagcgattgcattggcgcctcgggcttgctcatcgtagtcggatcgcaagggtcatcttccgccaaatcggaattatctctactcgccgaaagatcgggcacctcagctacatcaagcagcacctccacatcaagcgccacttccttcattagctgggccaatcactcgggcctgtgccagagatcttaacttcgtcatgctactgaagaatgagggcccagaagaatagatgaccagcccaactgcgacccatagtggacgacctagggttggccgcccctaggggctgcgcccctctgtatttatccaggagctgcgcctcctttgttttcgagttttgttttacgttagctttagctactctcgaacacgcgcaaatctgcgctgtcttcgtgtattcagaactccaccctcgagtaatagattagattgctcgcatctttttcttattcgttcttcgattgcgcacaggaaacgatcttcgtgatcaggccgatctcgcatcagcaaggtcggtaaccacagggagttggttcagcgattgcattggcgcctcgggcttgctcgtcgtagtcggatcgcaagggtcatcttccgccaaatcggaattatctatactcgccgaaagatcgggcacctcagctacatcaagcaacacctccacatcgagcgccacttccttcattagctgggccaatcactcgagcctgtgccagagatcttaacttcgtcatgctactgaagaatgagggcccagaagaatagacgaccagcccaactgcggcccatagtggacgacctagggttggccgcccctaggggctgcgtgatgcacccagcccaggtggggttggccgaggcccaacaaattagggttgcccggagcccaacagttcattaagcacacccaactcagggaaaggcccaatcgcccaaaagactagcccaatgggggaagggtggctctcccttttaaagtggcttcctcctcccaggttaagcgaggtgggataattctgaggctcacacgggccccttcgg

SEQ ID NO: 392 - DNA, 8441 bp, Zea mays
  VARIATION (493)..(493): /replace="c" or "g" or "t"
  misc_feature (493): /note="Nucleotide given in the sequence has no preference with respect to those in the annotation for said position"
  VARIATION (537)..(537): /replace="c" or "g" or "t"
  misc_feature (537): /note="Nucleotide given in the sequence has no preference with respect to those in the annotation for said position"
  VARIATION (549)..(549): /replace="c" or "g" or "t"
  misc_feature (549): /note="Nucleotide given in the sequence has no preference with respect to those in the annotation for said position"
  source: /note="Zea mays BAC clone full insert sequence contig Ch4 bacm.pk184.c21.fis19"
gaaccgagctagctggaacacacagcttgttagcgcgaaacaggaacccatcctgtatgtgaaatttgccccatggtttcccattaatacaatggccgaaagcatctttaaaatcagcatcgtcaacatattgatcttttacagtgtgcaaaccaaagattttaaaatctaactgtgacagcatggtatagcgacgagacaaagcatcagcaataacattgtccttcccgttcttgtgtttaataatgtaaggaaaagactcaatgaattcgacccatttagcatgacgacggttcagatttgtttaagtacgaatatgttttaaagcctcatgatcagaatgaattatgaactcacgatgccaaagatagtgctgccatgtatgtaaagtgcgcactaacgcgtaaagctccttatcataagtagaatatttcagactagcaccgcttaatttttcactaaaataagcaactggttttccttcttgtaataaaacagcacctagcccaataccgctagcatcgcattcaagctcaaatactgtattaaaatcaggcaattgcaataggggagcttgggttaacttatctttcagagtgctgaacgcttcctcctgcgaatcactccaagcaaatggcacatctttctttgtaagctcatgtagaggcgctgcaatggagctaaaatcacgaacaaatctgcggtagaaaccggcaagtccaagaaagctctgaatttgtgtgaccgtcgtcggtgtaggccactcccgaatggcagcaatcttgctgctatccacctcaatgccctgtggagtaacaacataaccaagaaacgagacacgtcgtgtgcaaaagatgcatttttccatgttagcgaataactgggcggcacgcaatgcatcaaaaacatcacttaaatgttccaaatgctctttcttagatttgctgtaaataaggatatcatcgaaataaacaaccacaaacaatcctatgaagggcctcagaacttcattcatcactcgcataaaagtgctgggagcattagtcaatccaaacggcataaccaaccattcatataaaccaaatttcattttgaaggctgttttccattcatcacccagtttcattctaatctggtggtaaccactacgcaaatcaatcttagtaaaaataatggcaccactaagctcatctagcatatcatcaaggcgtggtataggatagcgataacgaatagtgatattattaatagcacgacagtctacacacatacgccatgacccatccttcttgggaacaagtaacacaggaacagagcaagggctaagagactcacgaatgtatcctttgtcaagcaacgcctgtatctggcgctgaatctccttcgtctcatccggatttgtacggtatggtgcgcggtttggaagctgtgcaccgggaatgaggtcgatctggtgctcaatgccacgaagcggtgggagacccggtggtaagtctttgggaaagacatcagcgtactcctgcaaaaggttagcaaccatagggggaatagccaaagatggtgcatcatcaagtgaaatgaggacactagagcatacaagtgcatagcatggcaaatgagcaccgtgtagatcatcaaaatcagcacgtgtagcaagtaaaacaggagccttcaacttaatttcagaaggaacagagggcgatggatcaagttgtttagcagttatagcagctcgggcaagatcatctttaacaatttgttcaggtgtcattggatgtataattattttctaacccttaaaaatgaaagaataatgattcgaacgaccatgatgcaagctatcagtatcatattgccaaggtcgaccaagtaacaaagagcatgcttccatgggaataacatcacaatcaacaaaatcagaataagcacccatggagaaaggaactcgcacggaacgcgtgatttttattttaccaccatcattaagccattgaatgtgatatgggtttggatgcttacgagtgggtaacgacaacttttcgaccagcatggtactcgccaaattgttgcaactgccgctgtcgataatgatgcgaattgaccgctcctgcacaacaccctttgtttggaacagagtgtgtcgctgattcttctcgggcaaagcgacctgtgtactgagaacacgctgcacaacaagactttcatacctatcagcgtcgcccgggttgacatgtacctccgccttagctgcatggtcagtggcaagtagtgcatgttcaatttcttcagaatcactagcggaagagtactcaccatcgtcacgaatgagtaaagtgcgcttgtttgggcagtcccgaatcacatggccaaatcctctacagcgatgacactgaatatcccgtgtacgacctgtgggtggggcagcgctggctggtttggtcgtcttctcgcgtggagtagtggtggacgtggatggcgcagggggaactggtgctgaggtggatgtcgagcttcgtcctgcaaaagggttagaatattgcttcgagcggcgtccctgcacttcacgttcagctttgcaagcatattcaaataaagtagtcatatcataatattccttataatcaagtatatcttggatttcgcggtttaaaccaccacgaaaacgtgccatagcagcgtcgttgtcctccaatatcccacaacgaatcatacctttttgtaactcctggaaatagtcctcaacagattgagaaccttgctgaaaacgctgcattttattaagcaaatcacgagcataatacgaaggcacaaatcgatgtcgcatcgcagctttcaactgatcccaagtggttggaatggtagtgggatgttttattttaaactcacgccaccaaattaaagcaaaatcagtaaattcactaatagcagctttaacctgaaaatgtgcagcaatatcatggcatgaaaatttttgttcaacctctaactcccaatcaagatatgcagcaggatcatatttgccattaaaaggtggaattttaaatttaatcttagaaaataagtcattagggggatgacgaaccacacggcgtgcacgaccacggcgatctccatcgtcccactcagtgtcaccgccgtagtcctgctccatctttgtggtcaacgcatcaaggcgtgccaggatggtgtcgagtgtggtgcgagtcgccgtttgagcaaggtcaagctggttgaaacgctcggtcgtcgaagtgaccgttgaatcaagccgttcatgcatcgtcctaatgtcatcagcaagtccatcaacttgtccctttacttctagcaactgggcatccaccctgtcatgtgctcctgccatagttagcgcaaacaccaaaaaaacgacaaaaacaggggtgtactgctcacaaggcgctcacactagtgctgttatcaaattcttatccgttcttaccaagccacagtggtgaactgcaaccaacaggtggaaccggtgaaagattggatgagcgattgcctggagaaacagaaacctactcgtcgtagaaatatgtggagttctgggtaggctgcactcaagtcaaggattagcacgaccaaacaataatgcaaagttgaattatagtgcaaaacacgaaactatattgctggccacaagtgcaaaggacggatggaactagcagaatggcagtaccgtaaatattgtactagtgatgccaaaaagggtttccaggttgatcggtgagtttatcgagcgttttttttcctacagtccacaaaaccgcataaaaattcaggttagatcttatcccagcacccttttgagcctcgcactttctttcaataatctgcattgttgaatttgtgtgctttcgcgtcatttgttgctggttgcattgtgttcttccaccattcaaaccctagcgccgccaccatctcccgtttgatcatgccacaaaccgagtcaacattgtttccttgtttttctccttcggttacgtcaaaaaaaaaacagaaaaaacaaaccgagtcaacggccgtttccttgattttctccttcggttacgaaaaaaaacagaaaaaaaacaaaccgagtcaacgaccgcttccttgtttttctccttcagttacataaaaaaaaaaacagaaacaaaaaaaacgaaggagaaaggatacgtttgtttcatccccggtcgtttttaaaacataacttgaggaaccttccataaaccgggcataacttttcgctcgggtgtccaaaaaatctgaaatttttacaggagctagttgacaccattctgaggccggccaaactcacctacggtctgtttgggtttcgacaaaattgtcaaaaaaattcaggaaaataaagaaaaaaatccgtcaaagttctcgcacgcttttcagagaacttcctgattttctatagaccacatctgatatctgttttaggtgaaacttcgtgtagctcctatcttgttgcttcttgtgctgagaaaaatatcaaaaaaatcatacaaaaaagaaaaacaaaatcacctgtgatttctactagtgcctttttggcatcactagtacaatatttacggtactgccattctgctagttccatccatcctttgcacctgtggccagcaatatagtttcgtgttttgcactataattcaactttgcattattgtttgatcgtgctaatccttgacttgagtgcagcctacccaaaactccacatatttctacgacgagaaggtttctgtttctccaggcaatcgctaatccaatctttcaccggttccacctgttggttgcagttcaccactgtggcttggtaagaacggataagaacttgataacagcactagtgtgagcgccttgtgagcagtacacccctgtttttgtcgttggtttttttctccttttggtgttttggtgtttgcgctaactatggcaggagcacacgacatggtggatgcccagttgcaggaagtcaggggacaagttgatggacttgctgctgacattagaacgatgcatgaacgacttgattcaacggtcacttcgacgaccgagcgtttcaaccaacttgaccttgctcaaacggcgactcgcaccacactcgacaccatcctggcacgccttgatgcattgaccacaaagatggagcaggaatacggcggtgacactgagcaggacgatggagatcgccgtggtcgtgcacgtcgtgtggttcgtcatccccctaatgacttattttctaagattaaatttaaaattccatcttttaatggtaaatatgatcctgctgcatatcttgattaggaattggaggtagaacagaaattttcatgccatgatattcctgctaatagccaagtgaaggctgccattagtgaatttactgattttgctttaatttggtggcgtgagtataaacaaaaacttcccattaacagtgtcattacttggacccaattaaaaactgccatgcgccacagatttgttccttcctattatgctcgtgatttgcttaacaaaatgcagcgttttcaacaaggttcacaatctgttgaggaatattaccaggagttgcaaaagggtatgcttcgttgtggtttggttgagtcagatgacgctgctatggcgcgttttcgtggtggtttgaacagggaaattcaggatatacttgattataaggattattttgatataaccacattgtttgaatatgcttgcaaagctgaacgtgaagtgcagggacgacgatcaaagacatatactaactcttttgcaggccggggtccaacacacagctcaactccttccagtcctgcaccttctacgcctagcactacatcgcgcacagggacgaccaagccagtggcgccccctgccaaaggcgccgcttcttccacaggacgtacacgggatattcagtgccatcgttgcagagggtttgggcacatgattcgggactgcccaaacaagcgtaccttgcttatacgtgacaatggtgagtactcttcagccagtgattctgaggaaactagtcatgctatgattgccactaaccatgcagaaaatgaggaagtccacgttgatcccatcgacgccgataggtatgagagtcttgttgtgcagcgtgttctcagcacacaggttgcccaggccgaaaaaaatcagcgacacactctattccataccaagggcgtcgtgcacgaacggtcgattcgcatcatcatcgatagtggcagctgcaacaatttggcaagtacagcgttggtagagaaattatccttgcccactcgcacacatccacatccgtatcacattcaatggcttaatgatggtggtaaaataaaggtaacatgtttggtacgtgtccccttttcgctgggttcttattctgattatgctgattgcgatgttattcctatggaagcatgctctttgttattgggtcgaccttggcaatatgatactgatagtttacatcatggtcgttcaaatcattattctttcatgtttaaaggccagaaaataattatacatccaatgacccctgaccaaattttgaaagatgatcttactagggctgctaaaactgcacaacaagtcaaatcgacatcagccgcacctattaaatctgaaatcaagttgcactctcctgttttacttgctacacgtgctgattttgatgatctccatgaagctcatatgccctgttatgcacttgtatgctcgcgcatgcttgttccgcttgatgatgcaccgtctttggatataccccctgttgttgttaaccttttgcaggagtatgctgatgtttatcctacggacttaccaccgggtctccctcccctctgtggcgttgagcatcagatcgatctcatccccggcgcttctcttccgaaccgcgccccgtaccgtacaaatccagaggagacgaaggagatccagcgccaggtgcagacgctgcttgataagggttacattcgtgagtctcttagcccttgctcggttcctgttttactcgttccaaagaaagatgggtcatggcgtatgtgcgtagattgtcgtgctattaataacatcacagttcgttatcgatatcctattccacgccttgatgatatgttagatgagcttagtggtgccgttattttctctaaggttgatttacgtagcggttaccatcagattagaatgaaactcggtgatgaaaggaaaacgacttttaaaacgaaatttggtttatatgaatggttggttatgccatttggattgactaatgctcccagcacctttatgcgtttaatgaacgaagttctacgggccttcataggtttgtttgttgttgtttatttcgatgatatccttatttacagtaagtctatagaggagcatttagaacatttgcgtgctgtttttgatgctttgcgtgctgctcgcttgtttggtaacatggaaaagtgcacattttgcacgcaacgtgtctcgtttcttggttatgtggttactccgcagggcattgaggtggatagcagcaagattgctgccattcgggagtggcctacaccaacgacggtcacacaaatttggagctttcttggacttgccggtttctaccacagatttgttcgtgattttagctccattgcagcgcctctacatgagcttacaaataaagatgtgccgtttgctttgagtgattcgcaggaggtagcgttcagcactttgaaagataagttaacccaagctcccctcttgcaattgcctgattttaataaagtttttgagcttgaatgcgatgctagcggtattgggctaggtgctgttttgttacaagaaggaaaaccagttgcttattttagtgaaaaattaagcggtgctagtctgaaatattctacttttatgataaggagctttatgctttagtgcgcactttgcatacatggcagcactatctttggcatcgtgagttcataattcattctgatcatgaggctttaaaacatattcgtacccaaacaaatctgaatcgtcgtcatgctaaatgggtcgaattcattgagtcctttccttacattattaaacacaagaacgggaaggacaatgttattgctgatgctttgtctcgtcgctataccatgctgtcacaattagattttaaaatctttggtttggacactgtgaaggatcaatatgttgacgatgctgattttaaagatgctttcggccattgtattaatgggataccatgggacaaatttcacatacaggatgggttcctgtttcgcgctaacaagttgtgtgttccagctagttcggttcgtcttttgttgttacaggaggcgcatggaggcggtctcatggggcattttggcgtctacaaaacgcatgaggtgttggctgcccacttcttttggccgctttcg

SEQ ID NO: 393 - DNA, 6634 bp, Zea mays
  source: /note="Zea mays BAC clone full insert sequence contig Ch4 bacm.pk184.c21.fis20"
ccccacccccctttttttcggaaatggggtggacgggcgggcaaacgaaaattggcgcggaaaccccctcctcaccattgtttttttgaacctaaaattagggggttggggcatgttcgtttgcgaaaaacaaagaaaatggtttccggcggcaaaaactccgtgcttgtatgcacccccgacccccttttttggatggggtgacgtgcggcaacgaatttgcgcggaaccactcctcaacatgtgttttggccctaaagtagtggatggggcatgttcgttgcaaaaaacgaagtaatggttccggtggcaaaaactcgtgctttgtatgcaccccgacacccgttttcggaatgggtgacgtgcggcaatgaaattgcgcgaaaccactccaaacatttgttttggacctgaagtagtggattgggcatgttcgttgcgaaaaacgaagaaatggttccggtggcaaaaactcgtgcttgtatgcaccccgacacctgttttcggaatgggtgacgtgcggcaatgaaatcgcgcgaaaccaccccaaacatgtattttggacctaaagtagtggattgatgttcgttgcgaaaaacgaagaaacggtaccggtggcaaaaactcgtgctttgtatgcaccccgacacccgttttcggaatgagtgatgtgcggcaacgaaattgcgcgaaaccaccccaaaaatgagttttggacctaaaatagtggattgggcatgttcgttgcgaaaaacgaagaaatggttccggtggcaaaaactcgtgcttgtatgcaccccgacacccgtcttcggaatgggtgacgtgcggcaacaaaattgcgcgaaaccaccccaaacatgtgttttggacctaaagtagtggattgggcatgttcgttgcgaaaaacgaagaaatggttccggtggcaaaaactcgtgtttgtatgcaacccgacacccgttttcggaattggttacgtgcggcaataaaattgcgcgaaaccaccccaaacatgtgttttggacctaaaatagtggattcggcatgttcgttgcgaaaaacgaagaaatggttccggtggcaaaaactggtgcttgtatgcacccgacacctgttttcagaatgggtgacgtgctgcaacgaaattgtgcgaaaccaccccaaacatgcgttttggacctaaagtagtggattgggcatgttcgttgggaaaaaacgaaaatattgttcctgtggcaaaaactcgcgctttgtatgcaccccgacacccgttttcggaatgagtgacgtgcggcaacgaaattgcgcgaaaccaccccaaacatgagttttggacctaaagtagtggattgggcatgttcgttgcgaaaaacgaagaaatggttccagtggcaaaaactcgtgcttgtatgcaccccgacacccgttttcggaatgggtgacgtgcggcaatgaaattgcgcgaaaccaccgcaaacatgagttttggacctaaagtagtggattggttatgttcgttgcgaaaaacgaagaaatggttccggtggcaaaaactcgtgcttgtatgcaccccgacacccgttttcggaatgggtgacgtgcgacaatgaaatcacgcgaaaccgctgcaataaaattgtgcgaaaccaccccaaacatgtgttttggacctaaagtagtggattcggcatgttcgttgcgaaaaacgaagaaatggttccggtggcaaaaactcgtgcttgtatgcacccgacacccgttttcggaatgggtcacgtacggcaaaaaaattgcgcgaaaccaccgcaaacatgagttttggacctaaagtagtggattgggcatgttcgttgcgaaaaacgaagaaatggttccggtggcaaaaactcgtgcttgtatgcaccccgacacccgttttcggaatgggtgacgtgcgggaatgaaattgcgcgaaactaccccaaacatgtgttttggacctaaagtagtggattgggcatgttcgttgcgaaaaacgaagaaatggttccggtggcaaaaactcgtgcttgtatgcaacacgacacctgttttcggaatgggtgacgtgcggcaacgaaattgtgcgaaaccaccccaaacatgcgttttggacctaaagtagtggattgggcatgttcgttgggaaaaaacgaaaatattgttcctgtggcaaaaactcgcgctttgtatgcaccccgacacccgttttcggaatgagtgacgtgcggcaacgaaattgcgcgaaaccaccccaaacatgagttttggacctaaagtagtggattgggcatgttcgttgcgaaaaacgaagaaatggttccagtggcaaaaactcgtgcttgtatgcaccccgacacccgttttcggaatgggtgacgtgcggcaatgaaattgcgcgaaaccaccgcaaacatgagttttggacctaaagtagtggattggttatgttcgttgcgaaaaacgaagaaatggttccggtggcaaaaactcgtgcttgtatgcaccccgacacccgttttcggaatgggtgacgtgcgacaatgaaatcacgcgaaaccgctgcaataaaattgtgcgaaaccaccccaaacatgtgttttggacctaaagtagtggattcggcatgttcgttgcgaaaaacgaagaaatggttccggtggcaaaaactcgtgcttgtatgcacccgacacccgttttcggaatgggtcacgtacggcaatgaaattgcgcgaaaccaccgcaaacatgagttttggacctaaagtagtggattgggcatgttcgttgcgaaaaacgaagaaatggttccggtggcaaaaactcgtgcttgtatgcaccccgacacccgttttcggaatgggtgacgtgcgggaatgaaatcgcgcgaaactaccccaaacatgtgttttggacctaaagtagtggattgggcatgttcgttgcgaaaaacgaagaaatggttccggtggcaaaaactcgtgcttgtatgcaacccgacacccgttttcggaattggttacgtgcggcaataaaattgcgcgaaaccaacccaaacatgtgttttggacctaaaatagtggattcggcatgttcgttgcgaaaaacgaagaaatggttccggtggcaaaaactggtgcttgtatgcacccgacacctgttttcagaatgggtgacgtgctgcaacgaaattgtgcgaaaccaccccaaacatgcgttttggacctaaagtagtggattgggcatgttcgttgggaaaaaacgaaaatattgttcctgtggcaaaaactcgtgctttgtatgcaccccgacacccgttttcggaatgggtgacgtgcggcaatgaaattgcgcgaaaccaccgcaaacatgagttttggacctaaagtagtggattggttatgttcgttgcgaaaaacgaagaaatggttccggtggcaaaaactcgtgcttgtatgcaccccgacacccgttttcggaatgtgtgacgtgctgcaacgaaattgtgcgaaaccaccccaaacatgagttttggacctaaagtagtggattgggcatgttcgttgcgaaaaacgaagaaatggttccggtggcaaaaactcgtgcttgtatgcaccccgacacccgttttcggaatgggtgacgtgcggcaatgaaatcgcgcgaaaccacccccaaacatgtgttttggaccaaaagtagtggattgggcatgtacgttgcgaaaaacgaagaaatggttccggtggcaaaaactcgtgcttgtatgcaccccgacacctgttttcggaattggtgacgtgcggcaataaaattgcgcgaaaccacccgaaacattggttttggacctaaaatagtggattgggcatgttcgttgcgaaaaacgaagaaatggttcctgtggcaaaaactcgtgctttgtatgcaccccgacacccgttttcggaatgggtgacgtgtggcaacgaaattgcgcgaaaccaccccaaacatgagttttggacctaaagtagtggattgggcatgttctttgcaaaaaacaaagaaatggttccgttggcaaaaactcgtgctttgtatgcaccccgacacccgttttcggaatgggtgacgtgcggcaacgaaattgcgcgaaaccaccccaaacatgagttttggacctaaagtagaggattgggcatgttcgttgcgaaaaacgaagaaatggttccggtggcaaaaactcgtgctttgtatgcaccccgacacccgttttcggaatgggtgacgtgcggcaacgaaattgcgcgaaaccaccccaaacatgagttttggacctaaagtagtggattgggcatgttcgttgcgaaaaacgaagaaatggttccggtggcaaaaactcgtgcttgtatgcaccccgacacccgttttcggaatgggtgacgtgcggcaatgaaatcgcgcgaaaccaccccaaaaatgtgttttggacctaaagtagtggattgggcatgttcgttgcgaaaaacgaagaaatggttccggtggcaaaaactcgtgcttgtatgcaccccgacacctgttttcggaattggttacgtgcggcaataaaattgcgcgaaaccacccgaaacattggttttggacctaaaataatggattgggcatgttcgttgcgaaaaacgaagaaatggttccggtggcaaaaactcgtgcttgtatgcaccccgacacccgttttcggaatgtgtgacgtgctgcaatgaaattgcgcgaaaccaccgcaaacatgtgttttggacctaacgtagtggattggttatgttcgttgcgaaaaacgaagaaatggttccggtggcaaaaactcgtgcttgtatgcaccccgacacccgttttcggaatgggtgacgtgcgactatgaaatcacgcgaaaccgctgcaataaaattgtgcgaaaccaccccaaacatgtgttttggacctaaagtagtggattcggcatgttcgttgcgaaaaacgaagaaatggttccggtggcaaaaactcgtgcttgtatgcacccgacacccgttttcggaatgggtcacgtacggtaatgaaattgcgcgaaaccaccgcaaacatgagttttggacctaaagtagtggattgggcatgttcgttgcgaaaaacgaagaaatggttccggtggcaaaaactcgtgcttgtatgcaccccgacacccgttttcggaatgggtgacgtgcgggaatgaaatcgcgcgaaactaccccaaacatgtgttttggacctaaagtagtggattgggcatgttcgttgcgaaaaacgaagaaatggttccggtggcaaaaactcgtgcttgtatgcaacccgacacccgttttcggaattggttacgtgcggcaataaaattgcgcgaaaccaacccaaacatgtgttttggacctaaaatagtggattcggcatgttcgttgcgaaaaacgaagaaatggttccggtggcaaaaactggtgcttgtatgcacccgacacctgtttacagaatgggtgacgtgctgcaacgaaattgtgcgaaaccaccccaaacatgcgttttggacctaaagtagtggattgggcatgttcgttgggaaaaaacgaaaatattgttcctgtggcaaaaactcgtgctttgtatgcaccccgacacccgttttcggaatgagtgacgtgcggcaacgaaattgcgcgaaaccaccccaaacatgagttttggacctaaagtagtggattgggcatgttcgttgcgaaaaacgaagaaatggttccggtggcaaaaactcgtgcttgtatgcaccccgacacccgttttcggaatgggtgacgtgcggcaatgaaattgcgcgaaaccaccgcaaacataagttttggacctaaagtagtggattggttatgttcgttgcgaaaaacgaagaaatggttccggtggcaaaaactcgtgcttgtatgcaccccgacacccgttttcggaatgggtgacgtgcgacaatgaaatcgcgcgaaaccgctgcaataaaattgtgcgaaaccaccccaaacatgtgttttggacctaaagtaatggattcggcatgttcgttgcgaaaaacgaagaaatggttccggtggcaaaaactcgtgctttgtatgcaccccgacacccgttttctgaatgagtgacgtgcggcaacgaaattgcgcgaaaccaccccaaacatgagttttggacctaaagtagtggattgggcatgttccttgggaaaaacaaagaaatggttccggtggcaaaaactcgtgtttgtatgcacccccgacacccgttttcggaatgggtgacgtgcggcaatgaaattgcgcgaaaccaccgcaaacatgagttttggacctaaagtagtggattgggcatgttcgttgcgaaaaacgaagaaatggttccggtggcaaaaactcgtgcttgtatgcaccccgacacccgttttcggaatgggtgacgtgcgggaatgaaatcgcgcgaaactaccccaaacatgtgttttgaacctaaagtagtggattgggcatgttcgttgcgaaaatcaagggaaacgataccgtcgacctcgccctgttgtatttta

SEQ ID NO: 394 - DNA, 15867 bp, Zea mays
  VARIATION (4767)..(4767): /replace="c" or "g" or "t"
  misc_feature (4767): /note="Nucleotide given in the sequence has no preference with respect to those in the annotation for said position"
  source: /note="Zea mays BAC clone full insert sequence contig Ch4 bacm.pk184.c21.fis21"
cgccagcgttggcgcattttcgcaagaagaaaactttataagaggtaaccccgaaggtcccctggaatggatcaatcatgaggcggaggcctttgaagaaattttaaatagtcgcggagacatctgcgctttttctggtgccagagggattgccactattttggaggggaaaggatgtgaacatgtaaagattttatcgcagtccgaagccaccttgtccactgaagatataaaagatccttcagccgaagctagcgcggttgggggaaaatttttcaccgacatctgggacaacggtggtagagaaatggcccaagaaatcattcacaaaagcgagaaagggattcatgaggctagaaaagtagccgaggctgctgagaaaaacgcagagcccgaagggcaaataggtactaacgaatagttttcattgcattataacttttaattttatagttcgttcgcgatctgtaataatgatgtaatagtatcccgtcctcactcagttcctactaaagcatcttcgggccctcagcctaaagatgacgacgaaattaaaaagatggccgaagctatcatggatcaagttgtcgatcgactgctgaacgaagctgcagagatagtacttagggaagactaagtgctattggagaaaacatttgatatatgatttgtgtaatattctgtaatcctgtatgtaatatacttgttttatgattcaattctttacgatgcatgaaactttaaacacgtaccatttttgagtcttcgacgaaaaaacaccttcccttcttttcatgcttcgtgaagaagaatttatcatttatcacgacaatatccatagtgttctgataagaaatatccaagcttcgtaaaaataatctccgaagctatacctcgaaaatcaatattgtttctccctgtaacttggcatgatttgccctttttcaaagcattttccgaagatcgataacatgcccccttcttgtgccacatgcagcatgatgtatgatgattatgctatgcaaaatgatgtgatgatgttatgttatgcaaaatgatattttgtgccgaagatacgcacattcctgcaatggggcacaatcttttgtatcaatactgactttttcattataagcctcccttaggagcttcttcgccttttacttcagcggaatcagcgtttatttttcgctgtaagttctgcatccccttaggaacgtctttggaacttcttcgccttttacttaggcggtataagctctgcattcccttaggaacgtctttggagcttcttcgccttttacttaggcggtatcagcgttgacttttcgctgtatgctctgcattccttttggaacgactttggagcagaaaacttacactgcgctcccttcggaacgactttttgtgacttcgtcagacttactctgcgttccttagaacgactttttgttgcttcgaaggattttcgatagtccgaaggtcctttttattatcacaaacctgtgaagaaaacatatttttcttgtaggaatcaacgaaactaattacatgaaacctaaacaatgtcctttattacaaaaaataaaactgaatgaaaaagattgctattaaggtaggatatttgtcaatagatgtgttttgactctggcacggtgctgttgaccgtgcgagcttcggactgttctctgaagtccctttgatgtggagcatattggctcccttctggctgctggccttgttgcaacggaggtggaggcgggggctgttgccaggaagctgaaggctgacttgccgaagcagcagagactgcaggatggttgcccacatattctgggatgtagggcgaatgatacgaagcagtgtgcatgacctgcttcggctgagcctgttgcgcggcagcttcggctatctctttttgcttttgaatggtaacatgacacatcctggtagtatgacctttgttttcaccacagaataagcaaaatattcttctgggttgatccccgaatcttccgccgaagcccctggcgcctctgcctcttggagctggtggtcggaaggagctttgctgttgccccgaagcctgtgaggagtactgtggcctttgctgctggctccccttatcatcattttgattggaattatgaattgatctgacatgcctcggatagaatcttcctccgaagcccctggtcatctcagaaaatctgaaggcctcctcccttctttggcgaaaatcattgtcagctcgaatatattcatccatcttctggagcagcttctccagcgtttgtggtggcttcctggcaaaatactgcgctgatggccctggccgaagccccttgatcatggcctcaatgacaatctcattgggcactgtcggcgcctgtgcccttagacgcagaaaccttcggacatatgcctgaaggtattcttcgtggtcctgggtgcactggaaaagggcctgagcagtgaccggctttgtttgaaacccttggaaactagttatgagcatatccttcagtttctgccaagaagtgattgtccctggccgaagagaagagtaccaggtctgagcaacacctctgacggccatgacgaaggattttgccatgactgccgtattgccaccgtatgaagatattgttgcctcgtagctcattaggaattgcttcgggtctgagtgaccgtcatatatgggaagctggggtggcttgtaagtctgtggccaaggtgtagcctgcaattctgttgaaagaggagaagcatcatcaaaagcaaagtttccatgatggagatcttcataccagtcgtcttcattgcggaaatcttcctgatgaagctctctgcgtggaggccttcgggtttgatcgccttgaacgaaatgacggacctcttccgaagcttcatctatctgtctctgaagatcagctagacgagccatcttttccttcctgcgctgaacttgttgctgaaggatctctaaattttgaatttcctgatcaagatcatcatccggaggtgttggactgacagccttccttttctggcttcgggcttctctaagagaaataacatcctgattgggatccagcgactgcagtgtgccagctcctgttgttgaagccttcttcggcggcatgacgaaggtgacgctcgccgaaggtattcaaagctcaagaaatggaagtgagttcaccggaggtgggcgccaatgttggggacttgttctcaagtgctaagagtttaagaacaaggcaacatagaaaatgttaatcgttaatgcccttcgtccttcgaagcactatttcccttaggacataatgccttgcggacgaaggttatgaaggacataccttcataaattaatcaaataatgacgaaggatgaaatgtgaagaatgtaaaggaaaacatgaacaatcatttattattattgaacataaacaaaaatattattgaacaacaagtgtaccttcaatcggaaggaaatgattgtacaagcgtgacgcaaaaagcgaatgccaagtcagcgtgaacagtacagggatactgttcacctatttatagacacgggacacagcccttacaaaattacattcatgccctttacatctaacaataactctatagtaatctattgaggtctgaatagccttttcatctttaagtcggttccactctctgctgttacgccgaagctttcctgctcaacagcttcggctctgtatcaagcttcgtattattccggtctgctgcaatgccgattttagtctgagggtacctgttcacatattgtactacagaaatactgttaaattctgtttttgaggaccttcggacgccgaaggtccccaacaagttacaaaagggtatgcttcgttgtggtttggttgagtcggatgacgctgctatggcgcgttttcgtggtggtttgaacagggaaattctggatatacttgattataaggattattttgatataaccacattgtttgaatatgcttgcaaagctgaatgtgaagtgcagggacgacgatcaaagacatatactaactcttttgcaggccggggtccaacacacagctcaactccttccagccctgcaccttctacgcctagcactacatcgcgcacaaggacgaccaagccagtggcgccccctgccaaaggcgctggttcttccacaggacgtacacgggatattcagtgccatcgttgcagagggtttgggcacatgattcgagactgcccaaacaagcgtaccttgcttatacgtgacaatggtgagtactcttcagccagtgattctgaggaaactagtcatgctatgattgccactaaccatgcagaaaatgaggaagtccacgttgatcccatcgacgccgataggtatgagagtcttgttgtgcagcgtgttctcagcacacaggttgcccaggccgaaaaaaatcagcgacacactctattccataccaagggcgtcgtgcacgaacggtcgattcgcatcatcatcgatagtggcagctgcaacaatttggcaagtacagcgttggtagagaaattatccttgcccactcgcacacatccacatccgtatcacattcaatggcttaatgatggtggtaaaataaaggtaacacgttcggtacgtgtccccttttcgctgggttcttattctgattatgctgattgcgatgttattcctatggaagcatgctctttattattaggtcgaccttggcaatatgatactgatagctgacatcatggtcgttcgaatcattattctttcattttaagggtcagaaaataattatacatccaatgacacctgaacaaattgttaaagatgatcttgcccgagctgctataactgctaaacaacttgatccatcgccatctgctccttctgaaatcaagttgaaggctcctgttttacttgctacacgtgctgattttgatgatctacacggtgctcatttgccatgctatgcacttatatgctctagtgtcctcatttcacttgatgatgcaccatctttggctattccccctatggttgctaaccttttgcaggagtacgctgatgtctttcccaaagacttaccaccgggtctcccaccacttcgtggcattgagcaccagatcgacctcattcccggcgcacagctgccgaaccgcgcaccgtaccgtacaaatccggatgagacgaaggagattcagcgccaggtacaggcgttgcttgacaagggatacattcgtgagtctcttagcccttgctctgttcctgtgttacttgttcccaagaaagatgggtcatggcatatgtgtgtagactgtcgtgctattaataacatcactattcgttatcgatatcctataccacgccttgatgatatgctagatgagcttagtggtgccattattttcactaagattgatttgcgtagtggttaccaccagattagaatgaaactgggtgatgaatggaaaacggcttttaaaacaaaatttggtttatatgaatggttggttatgccgtttggattgactaatgctcccagcacttttatgcgagtgatgaatgaagttctaaggcccttcataggattgtttgtggttgtttattttgatgatattcttatttacagcaaatctaagaaagagcatttggaacatttacgtgctatttttgatgcattgcgtgctgcccagttatttgctaacatggaaaaatgcatcttttgtacatgacgtgtctcgtttcttggttatgttgttactccacagggcattgaggtggatagcagcaagattgctgccattcgggagtggcctacaccgacgatggtcacacaaattcggagctttcttggacttgccggtttctaccgcagatttgttcgtgattttagctccattgcagcgcctctacatgagcttacaaagaaagatgtgccatttgcttggagtgattcccaggaggaagcgttcagcactttgaaagataagttaacccaagctcctctattgcaattgcctgattttaataaagtgtttgagcttgaatgcgatgctagcggtattgggctaggtgctgttttgttacaagaaggaaaaccagttgcttattttagtgaaaaattaagcggtgctagtctgaaatattctacttatgataaggagctttacgctttagtgcgcactttgcatacatggcagcactatctttggcatcgtgagtttataatccattctgatcatgaggctttaaaacatattcgcccaaacaaatctgaaccgtcgtcatgctaaatgggtagaattcattgagtcctttccttacattattaaacacaagaacgggaaggacaatgttattgctgatgctttgtctcgtcgctataccatgttgtcacagttagattttaaaatctttggtttgcacactgtgaaagatcaatatgttgatgatgctgattttaaagatgctttcggccattgtattaatgggaaaccatggggcaaattttacatacaggatgggttcctgtttcgcgctaacaagctgtgtgttccagctagctcggttcgtcttttgttgttacaggaagcacatggaggcggtctcatggggcactttggcgtctacaagacacatgaggtgttggctgcccacttcttttggcctcgaatgcgcgctgatgttgagcgccttgttgcacgctgcactacttgtcagaaagctaagtcacggttgaacaaccatggtttgtatatgcctttgcctgttcctacttccccttggattgatatttcgatggattttgttttgggattgcctagaactaagaaggggagggatagcatttttgtggttgttgatcgattctccaaaatggctcatttcataccttgtcataagactgatgatgctagcaatgttgctgaattgttttttagagagattattcgtttgcacggtattcccaatacaatagtctcggatcgtgatgctaagtttctgagtcatttttggagatctctgtggaataaattgggaactaaattgctgtttagcaccacttgtcaccctcagactgatggtcaaactgaggtagttaatcgaactttgtctaccatgcttagggctgttttagacaaaaatttgaaacgttgggaggattgcttgcctcatgttgagtttgcttataatcatgcaacccattcttctacaaagatgtgcccttttcaaattgtttatgttacattcctagggcgcctattgctttgttttcgcttgatgctgcggacgccccacacatagatgctcttgcacatgttgaacaaatgattaatctccatgaacaaactcaacaaaacattgctgctgctaatgctaaatatcagattactggtagtaaaggccggaaactagttacttttgaacctggtgatatggtttggttgcatttgagaaaggatcgttttcctactttgcgtcgttctaaattgatgcctcgtgctgctggtccttttaagatactaaccaagattaatgataatgcttataccctcgacctgcctgcggagtttggtgtttccactagttttaatgttgcagatttgaaaccgtatgcgggagaagacgaggagttgccgtcgaggacgacttcagttcaagaaggggaggatgatgaggacatcaacaccaacacgagcacatctacaccagcagcaccttctccagcccaggcaccatcttccccagtccaggcgccaccccttccacctgggccagtgacttgggcccgtgcaagagaattgaactacattatgctgttaaagaacgaaggcccggaagaatagacgaccagcccaactgcggcccataatggacgacctagggttggccgcccctaggggctgcgccccctctctatttatccaggagctgcgcctcctttattccttgagttttgttttacgttagccttagctactctcgaacacgcgcaaatctgcgctgtcttcgtgtattcagaactccaccctcgagtaatagattagattgctcgcatctttttcttgttcgttcttcgattgcgcacaggaaacgatcttcgtgatcaggccgatctcgcatcagcaaggtcggtaaccacagggagttggttcagcgattgcattggcgcctcgggcttgctcgtcgtagtcggatcgcaagggtcatcttccgccaaatcggaaatatctctactcgccgaaagatcgggcacctaagctacatcaatgttcgttgcgaaaaacgaagaaatggttccggtggcaaaaactcgtgcttgtatgcaccccgacacctgttttcggaatgggtgacgtgcggcaatgaaatcgcgcgaaaccaccccaaacatgtattttggacctaaagtagtggattgatgttcgttgcgaaaaacgaagaaacggtaccggtggcaaaaactcgtgctttgtatgcaccccgacacccgttttcggaatgagtgacgtgcggcaacaaaattgcgcgaaaccacgccaaacatgagttttggacctaaagtagtggattgggcatgttcgttgcgaaaaatgaagaaatggttccggtggcaaaaacttgtgcttgtatgcaccccgacacccgttttcggaatgggtgacgtgcggcaacgaaattgcgcgaaaccaccccaaacatgagttttggacctaaagtagtggattgggcatgttcgttgcgaaaaacgaagaaatggttccggtggcaaaaactcgtgcttgtatgcaccccgacacccgtattcggaatgggtgacgtgcggcaatgaaatcgcacgaaaccaccccaaacatgtgttttggacctaaggtagtggattgggcatgttcgttgcgaaaaacgaagaaatggttccggtggcaaaaactcgtgcttgtatgcaccccgacaccccgttttcggaatgggtgacgtgcggcaatgaaattgcgcgaaaccactccaaaaatgtgttttggacctaagtagtggattgggcatgttcgttgcgaaaaacgaagaaatggttccggtggcaaaaactcgtgcttgtatgcaccccgacacctgttttcggaatgggtgacgtgcgacaatgaaatcgcgcgaaaccacctcaaacatgtgttttggacctaaagtagtggattgggcatgttcgttgcgaaaaacgaagaaacggttccggtggcagaaattcgtgctttgtatgcaccccgacacccgttttcggaatgagtgacgtgcggcaacgaaattgcgcgaaaccaccccaaacatgagttttcaatctaaagtagtggattgggcatgttcgttgcgataaacgaagaaatggttccggtggcaaaaactcgtgcttgtatgcaccccgacacccgttttcggaattggtgacgtgcggcaataaaattgcgcgaaaccaccccaaacatttgttttggacctaaaatagtggattgggcatgtttgttgcgaaaaatgaagaaatggttctggtggcaaaaactcgtgcttgtatgcaccccgacacctgttttcggaatgggtgacgtgctgcaacgaaattgtgcgaaaccaccccaaacatgcgttttggacctaaagtagtggattgggcatgttcgttgggaaaaacgaaaatatggttccggtggcaaaaactcgtgctttgtatgcaccccgacacccgttttcggaatgagtgatgtgcggcaacgaaattgcgcgaaaccaccccaaaaatgagttttggacctaaaatagtggattgggcatgttcgttgcgaaaaacgaagaaatggttccggtggcaaaaactcgtgcttgtatgcaccccgacacccgtcttcggaatgggtgacgtgcggcaacaaaattgcgcgaaaccaccccaaacatgtgttttggacctaaagtagtggatttggcatgttcgttgtgaaaaaggaagaaatggttccggtggcaaaaactcgtgcttgtatgcaccccgacacccgttttcggaatgggtgacgtgcggcaacgaaattgcgcgaaactactcttaacatgtgttttggacctaaagtagtggattgggcatgttcgttgcgaaaaacaaagaaatggttccggtggcaaaaactcgtgcttgtatgcaccccgacacccgtttttggaatgggtgacgtgctgcaacgaaattgcgcgaaaccactcttaacatgtgttttggacctaaagtagtggattgggcatgtccgttgcaaaaaacgaagtaatggttccggtggcaaaaactcgtgctttgtatgcaccccgacacccgttttcggaatgggtgacgtgcggcaatgaaattgcgcgaaaccactccaaacatttcttttggacctgaagtagttgattgggcatgttcgttgcgaaaaacgaagaaatggttccggtggcaaaaactcgtgcttgtatgcaccccgacacctgttttcggaatgggtgacgtgcggcaatgaaatcgcgcgaaaccaccccaaacatgtattttggacctaaagtagtggattgatgttcgttgcgaaaaacgaagaaacggtaccggtggcaaaaactcgtgctttgtatgcaccccgacacccgttttcggaatgagtgacgtgcggcaacaaaattgcgcgaaaccaccccaaacatgagttttggacctaaagtagtggattgggcatgttcgttgcgaaaaacgaagaaatggttccggtggcaaaaacttgtgcttgtatgcaccccgacacccgttttcggaatgggtgacatgcggcaacgaaattgcgcgaaaccaccccaaacatgagttttggatctaaagtagtggattgggcatgttcgttgcgaaaaacgaagaaatggttccggtggcaaaaactcgtgcttgtatgcaccctgacacccgtattcggaatgggtgacgtgcggcaatgaaatcgcgcgaaaccaccccaaacatgtgttttggatctaaagtagtggattgggcatgttcgttgcgaaaaacgaagaaatggttccggtggcaaaaactcgtgcttgtatgcaacacgacacctgttttcagaatgggtgacgtgctgcaacgaaattgtgcgaaaccaccccaaacatgcgttttggacctaaagtagtggattgggcatgttcgttgggaaaaaacgaaaatattgttcctgtggcaaaaactcgcgctttgtatgcaccccgacacccgttttcggaatgagtgacgtgcggcaacgaaattgcgcgaaaccaccccaaacatgagttttggacctaaagtagtggattgggcatgttcgttgcgaaaaacgaagaaatggttccagtggcaaaaactcgtgcttgtatgcaccccgacacccgttttcggaatgggtgacgtgcggcaatgaaatcgcgcgaaaccaccccaaacatgtgttttggacctaaagtagtggattgggcatgtacgttgcgaaaaacgaagaaatggttccggtggcaaaaactcgtgcttgtatgcaccccgacacctgttttcggaattggtgacgtgcggcaataaaattgcgcgaaaccacccgaaacattggttttggacctaaaatagtggattgggcatgttcgttgcgaaaaacgaagaaatggttcctgtggcaaaaactcgtgctttgtatgcaccccgacacccgttttcggaatgggtgacgtgtggcaacgaaattgcgcgaaaccaccccaaacatgagttttggacctaaagtagaggattgggcatgttctttgcaaaaaacaaagaaatggttccggtgacaaaaactcgtgctttgtatgcaccccgacacccgttttcggaatgagtgacgtgcggcaacgaaattgcgcgaaaccaccccaaacattagttttggacctaaagtagtggattgggcatgttcgttgcgaaaaacgaagaaatgtttccggtcgcaaaaactcgtgcttgtatgcaccccgacacccgttttcgaaatgtgtgacgtgctgcaacgaaattgtgcgaaaccaccccaaacatgagttttggacctaaagtagtggattgggcatgttcgttgcgaaaaacgaagaaatggttccggtggcaaaaactcgtgcttgtatgcaccccgacacccgttttcggaatgggtgacgtgcggcaatgaaatcgcgcgaaaccaccccaaacatgtgttttggacctaaagtagtggattgggcatgtacgttgcgaaaaacgaagaaatggttccggtggcaaaaactcgtgcttgtacgcaccccgacacctgttttcggaattggtgacgtgcggcaataaaattgcgcgaaaccacccgaaacattggttttggacctaaaatagtggattgggcatgttcgttgcgaaaaacgaagaaatggttccggtggcaaaaactcgtgctttgtatacaccccgacacccgttttcggaatgggtgacgtgtggcaacgaaattgcgcgaaaccaccccaaacatgagttttggacctaaagtagtggattgggcatgttctttgcaaaaaacaaagaaatggttccgttggcaaaaactcgtgctttgtatgcaccccgacacccgttttcggaatgggtgacgtgcggcaacgaaattgcgcgaaaccaccccaaacatgagttttggacctaaagtagaggattgggcatgttcgttgcgaaaaacgaagaaatggttccggtggcaaaaactcgtgctttgtatgcaccgcgacacccgtttttggaatgagtgacgtgcggcaacgaaatggcgcgaaaccaccccaaacatgagttttggacctaaagtagtggattgggcatgttcgttgcgaaaaacgaagaaatggttccggtggcaaaaactcgtgcttgtatgcaccccgacacccgttttcggaatgggtgacgtgcggcaatgaaatcgcgcgaaaccaccccaaacatgtgttttggacctaaagtagtggattgggcatgttcgttgcgaaaaacgaagaaatggttccggtggcaaaaactcgtgcttgtatgcaccccgacacctgttttcggaattggttacgtgcggcaataaaattgcgcgaaaccacccgaaacattggttttggacctaaaataatggattgggcatgttcgttgcgaaaaacgaagaaatggttccggtggcaaaaactcgtgcttgtatgcaccccgacacccgttttcggaatgtgtgacgtgctgcaacgaaattgtgcgaaaccaccccaaacatgagttttggacctaaagtagtggattgggcatgttcgttgcgaaaaacgaagaaatggttccggtggcaaaaactcgtgcttgtatgcaccccgacacccgttttcggaatgggtgacgtgcggcaatgaaatcgcgcgaaaccaccccaaacatgtgttttggaccaaaagtagtggattgggcatgtacgttgcgaaaaacgaagaaatggttccggtggcaaaaactcgtgcttgtatgcaccccgacacctgttttcggaattggtgacgtgcggcaataaaattgcgcgaaaccacccgaaacattggttttggacctaaaatagtggattgggcatgttcgttgcgaaaaacgaagaaatggttcctgttgggggccttcggcttccgaaggtcctcaaaaacatgatttaacaatgtttctggagtataatgtgtgaacaggtatcttcggacttgtatcagaaagggagaagctcaaaagatacgaaggttgacacagtgccgaagatgtgaagcaggaaagcttcggcatgttcgcagaaaagggaaccgacttaaagatgaaaaggccatttggacctcgatagaatgctatagaattatcaccaaatgtaaagggcatgtatgtaattttgtgtgggttgtaccccgtgcctataaataggtgaacagtacccccgtactgttcacgctgatctggcatttgcttttgcgtcacacttgtattttcatctccttccaagccgaaggtacatttataattcgatattgtttctatttctttatgatgatataataaagttaaatgaatgatgttatatgattattcatgctatcttttatgtttcatatgcttcatttttcattaatgtatactgtgatgacgaaggttcgtccttcatggccttcgttcgaagatcgttatatcctaagggaaataatgcttcgaaggacgaaggactttatcgtttaacattctctgtgttgccttgttcttaactcatagcatttgagaacaagtccccaacattggcgcccaccgtggggtgaactcacttccatttcttgagctttttgacatcttcggcaagcatcaccttcgtcatgccgccgaagaaggcttcagcaccaggggctggcacgctgcagtcgctggaccccaatcaagacgtcctttctcttagagaggcacgaagccagaagaggaagactaccagtccaacacctccggaggatgatctagatcaggagattcaaaatctggaaatccttcagcagcaggttcaacgcaagaaggagaagatggccaggctagttgaattgcagaggcagatagatgaagcctctgaagaagttcgtcatcttgctcaggatgagcaacaccgaaggcctcagcatcaagaccttcatcaggagggctttcccaacgaagatgactggtatgacaatttccatcatgggaattttgtttttgatgatgcttctcccctgtccgctgagttacaggctacaccttggcctccgtcctacaagccgcctcagctccccgtatttgatggccactcagacccgaagcagtttttgatgagctacgaagcaacagtgtcttcgtatggtggcaatgcttcagtcatggccaaatctttcgttatggctgtcagaagtgttgctcaaacctggtattcttcccttcgaccaggaacgatcacttcatggcagaagctgaaggatttgttgttaaccagctttcaaggatttcagacgaagccggtcactgctcaggctctgttccagtgcactcaggaccacgaagaataccttcaggcatatgtccgaaggttcttgcgtctgagggcacaggcaccaacggtgcccaatgaaattgtcatcgaggccatgatcaaggggcttcggccaggtccgtcagctcagtatttcgccaggaagcctcctcaaactttggagaagcttctccagaaaatggatgaatacattcgggccgacaatgattttcgccaaagaagggaggaggctttcaggttttctgaaatgaccaggggcttcggaggaagattttacccgaggcatgtgagatcaattcacaattccacacaaaatgatgacagaggaagccaacagcaaaggccacaatgctcctcacaggcttctggtcaacagcaaagctcattccggccaccagctccaagaggcagaggcgccaggggcttcggaggaagatttgttgatcaaccgagaagaatcttttgcttattctgcggtgagaacaaaggccatactaccaggatgtgccatgttactatacagaagcaaaaggaaatagctgaagcagcagcacaacaagcccagccgaagcaggttatgcatacagcttcgtatcattcgccctacatcccagaatatgtgggcatcaaggtaaaagataccgtcgacctcgcaccctgtgtaatttga

SEQ ID NO: 395 - DNA, 18053 bp, Zea mays
  source: /note="Zea mays BAC clone full insert sequence contig Ch4 bacm.pk184.c21.fis22"
ggcaccgatcctcttattccacggttgcagacttgttggttgctgacccctcctgttgtgcaaggtaagaattggtaagagcttgtgtggcaggttgagagtgagcgccttgcagtagctacatcctaatagttgtagagtttttattccttcacgttttttttttcttgttgcctctgttcgtctaaccatggcaggattggaggttgatgatgcttctcgtaatatgccacactctcctcgcaccaagggtatcatacaacactttgtaaggctagtgaagacgcacacggaaggtcttgataatgacatgcaggtgacgaatgaaaagatggggcaattggaggccacacagatcgacacaaacaccaaacttgcaaatgtggaaatgacagttgctcatattgacaagagccttgtcgcactcttgaggcggtttgatgagatgcatgctaatatcaatggtgggcgtgatgagggcgccgaaggtaactgggatgactatgttgctgatactgaacaagatgaccaagaagcacctaatcgccggcgactacgtactaaccgtagaggtatgggtggttttcaccgacgtgaggtacatggtaatgatgatgcttttagtaaggttaaatttaaaatacctccttttgatggtaaatatgaccctgatgcttacattacttgggagattgcggttgatcaaaagtttgcatgccatgaatttcctgagaatgcgcgggttagagctgctactagtgagtttactgaatttgcttctgtttggtggatagaacatggtaagaagaatcctaataacatgccacaaacttgggatgcgttgaaacgggtcatgcgggctagatttgttccttcttattatgcacgtgatatgttaaacaagttgcaacaattgagacagggtactaaaagtgtagaagaatattatcaggaattacaaatgggtatgctgcgttgtaacatagaggagggtgaggaatctgctatggctagatttttgggcgggttaaatagggaaattcaggacatccttgcttataaagattatgctaatgtaacccgattatttcatcttgcttgcaaagctgaaagggaagtgcagggacgacgtgctagtgcaaggtctaatgtttctgcaggaaaatctacaccatggcaacagcgcacgactacgtccatgaccggccgtacaccagctccaactcccttgccaagtcgaccagcacccccgccttcctccggcgacaaaccacgtgcaccttccacaaattcagcaaccaaatctgcccagaaaccagcaggtagtgcctcttcagtagcctccacgggtagaacaagagatgttctgtgttatcgatgcaagggctatggacacgtgcagcgtgattgtcctaatcagcgtgttttggtggtaaaagacgatggtgggtattcctctgctagtgatttggatgaagctacacttgctttgcttgcggctgatgatgtaggcactaaggaaccacccgaagaacagattggtgcagatgatgcagagcattatgagagcctcattgtacagcgtgtgcttagtgcacaaatggagaaggcagagcagaatcagcgacatacgttgtttcaaacaaagtgtgtcattaaggagcgttcatgtcgtttgatcattgatggaggtagctgcaacaacttggctagcagcgacatggtggagaagcttgcacttacgaccaaaccgcacccgcatccatatcacattcaatggctcaacaatagtggtaaggtcaaggtaaccaagctggtacgaattaattttgctattggttcatatcgtgatgttgttgactgtgatgttgtgcctatggatgcttgtaatattctgctaggtagaccatggcaatttgattcagattgtatgcatcatggtagatcaaatcaatattctctcatataccatgataagaaaattattttgcttcccatgtcccctgaggctattgtgcgtgatgatgttgctaaagctaccaaagctaaaactgagaacaacaagaatattaaagttgttggtaataacaaagatgggataaaattgaaaggacattgcttgcttgcaacaaaaactgatgttaatgaattatttgcttccactactgttgcctacgccttggtatgcaaggatgctttgatttcaattcaagatatgcagcattctttgcctcctgttattactaacattttgcaggagtattctgatgtatttccaagtgagataccagaggggctgccacctatacgagggattgagcaccaaattgatcttattcctggtgcatctttgccgaatcgtgcgccatataggacaaatccagaggaaacaaaagaaattcagcgacaagtgcaagaactactcgacaaaggttacgtgcgtgagtctcttagtccgtgtgctgttccggttattttagtgcctaaaaaagatggaacatggcgtatgtgtgttgattgtagggctattaataatatcacgatacgttatcgacaccctattccacgtttagatgatatgcttgatgaattgagtggtgccattgtcttttctaaagttgatttgcgtagtgagtaccaccagattcgtatgaaattgggagatgaatggaaaactgctttcaaaactaagttcggattgtatgagtggttagtcatgccttttgggttaactaatgcacctagcactttcatgagattaatgaacgaggttttgcgtgccttcattggaaaatttgtggtagtatactttgatgacatattaatctacagcaaatctatggatgaacatgttgatcacatgcgtgctgtttttaatgctttacgagatgcacgtttatttggtaaccttgagaagtgcacattttgcaccgatcgagtttcgtttcttggttatgttgtgactccacagggaattgaggttgatcaagccaaggtagaagcgatacatggatggcctatgccaaagactatcacacaggtgcggagtttcctaggacttgctggcttctatcgccgttttgtgaaggactttagcaccattgctgcacctttgaatgagcttacgaagaagggagtgcattttagttggggcaaagtacaagagcacgctttcaacgtgctgaaagataagttgacacatgcacctctcctccaacttcctgattttaataagacttttgagcttgaatgtgatgctagtggaattggattgggtggtgttttgttacaagaaggcaaacctgttgcatattttagtgaaaaattgagtgggtctgttctaaattattctacttatgataaggaattatatgctcttgtgcgaacattagaaacatggcagcattatttgtggcccaaagagtttgttattcattctgatcatgaatctttgaaacatattcgtagtcaaggaaaactgaaccgtagacatgctaagtgggttgaatttatcgaatcgtttccttatgttattaagcacaagaaaggaaaagagaatatcattgctgacgctttgtctaggagatatactttgctgaatcaacttgactacaaaatctttggattagagacgattaaagaccaatatgttcatgatgctgattttaaagatgtgttgctgcattgtaaagatgggaaaggatggaacaaatatatcgttagtgatgggtttgtgtttagagctaacaagctatgcattccagctagctccgttcgtttgttgttgttacaggaagcacatggaggtggcttaatgggacattttggagcaaagaaaacggaggacatacttgctggtcatttcttttggcccaagatgagaagagatgtggtgagattggttgctcgttgcacgacatgccaaaaggcgaagtcacggttaaatccacacggtttgtatttgcctctacccgttcctagtgctccttgggaagatatttctatggattttgtgctgggattgcctaggactaggaagggacgtgatagtgtgtttgtggttgttgatagattttctaagatggcacatttcataccatgtcataaaactgacgatgctactcatattgctgatttgttctttcgtgaaattgttcgcttgcatggtgtgcccaacacaatcgtttctgatcgtgatgctaaatttcttagtcatttttggaggactttgtgggcaaaattggggactaagcttttattttctactacatgtcatcctcaaactgatggtcaaactgaagttgtgaatagaactttgtctactatgttaagggcagttctaaagaagaatattaagatgtgggaggactgtttgcctcatattgaatttgcttataatcgatcattgcattctactacaaagatgtgcccatttcagattgtatatggtttgttacctcgtgctcctattgatttaatgcctttgccatcttctgaaaaactaaattttgatgctactaggcgtgctgaattgatgttaaaactgcacgaaactactaaagaaaacatagagcgtatgaatgctagatataagtttgctagtgataaaggtagaaaggaaataaattttgaacctggagatttagtttggttgcatttgagaaaggaaaggtttcctgaattacgaaaatctaaattgttgcctcgagccgatggaccgtttaaagtgctagagaaaattaacgacaatgcatataggctagatctgcctgcagactttggggttagccccacatttaacattgcagatttaaagccctacttgggagaggaagttgagcttgagtcgaggacgactcaaatgcaagaaggggagaatgatgaagacatccacactactgatgcatctataccaatacaagtaccaatttctggtcccattactcgcgctcgtgctcgtcaactcaaccatcaggtgattacactcttgagttcatgtccatcatatttagaccatggagacccgtgcactcttgttttgcttaggaatcagggagaagaccgaaagggaaaaggatttgaacatgctggattcggactgcagaagaacaccaacttgtgacggtcaccacggtcagatgcgggctcggattggaatgttcaagcacaacatggaaagcttatcaagtctactttcatatggatccggaattatagtcatatctgttctgaggccgccgtaatcattgttttcttaccgagacatttcctgccttttctgcccatggtgctgcgtcaccctattttggcccaatgggtcgtgtatcaagttaggtccattagggacgcatcctagggttgcagcacgaccccaatacccttgtggtcgtcctcccatgtttataaaccccctagccgccaccaagaacggcgggttttgtttagatcaagtttagctctcgctacttgcttgtaagcgcgcgtgctagtcagccgcccgtcttcttgtcttcggaaccccaccatattgtagtttgatctttaaacctacatttagatctggtaattcagtacttgttctacttgttcttgctagttcttcgattgcttgcaggacgagtgccctagtggccagggtgtcacgctccacaagatcgtgacagccataggaggtggtgtatcggttgctaaggcgcagcgtctttggaaggctgtagtcgggccgtgaacgtcgtctcctcccccaatcgagttattccacaccctctcatcgaaagatcgggcaatcacccaacgggtgcacatcataaccgctacgcaaatcaaccttagagaaaataacggcaccactaagctcatctaacatatcatcaaggcgtggaataggatatcgataacgaactgtgatgttattaatagcacgacaatctacgcacatacaccatgacccatcttactttggaacgagtaaaacaggaaccgagcaagggctaagagactcacgaatgtaatccttatcaagcagcgtctgcacctggtgctggatctccttcgtctcctctggatttgtacggtacggggcgcggttcggaagagaagcgccggggatgagatcgatctgatgctcaatgccacggaggggaggaagacccggtggtaagtccgtaggataaacatcagcatactcctgcaaaaggttaacaacagcagggggtatatccaaagacggtgcatcatcaagcggaacaagcatgcgcgagcatacaagtgcataacagggcatatgagcttcatggagatcatcaaaatcagcacgtgtagcaagtaaaacaggagagtgcaacttgatttcagatttaataggtgcggctgatgtcgatttgacttgttgtgcagttttagcagccctagtaagatcatctttcaaaatttggtcaggggtcattggatgtataattattttctggcctttaaacatgaaagaataatgatttgaacaaccatgatgtaaactatcagtatcatattgccaaggtcgacccaataacaaagagcatgcttccataggaataacatcgcaatcagcataatcagaataagaacccagcaaaaaggggacacgtaccgaacgtgttacctttattttaccaccatcattaagccattgaatgtgatacggatgtggatgtgtgcgagtgggcaaggataatttctctaccaacgctgtacttgccatattgttgcagctgccactattgatgatgatgcgaatcgaccgttcgtgcacgacgcccttggtatggaatagagtgtgtcgctgattttgttcggcctgggcaacctgtgtgctgagaacacgctgcacaacaagactctcatacctattggcgttgatgggatcaacgtggacttcctcattttctgcatggttagtggcaatcatagcatgactagtttcctcagaatcactggctgaagagtactcaccattgtcacgtataagcaaggtacgcttgtttgggcagtcccgaatcatatgcccaaaccctctgcaacgatggcactaaatatcccgtgtacgtcctgtggaagaagcgacgcctttggcagggggcgccactggcttggtcgtccctgtgcgcgatgtagtgctaggcgtagaaggtgcagggctggaaggagttgagctgtgtgttggaccccggcctgcaatagagttagtatatgtctttgatcgtcgtccctgcacttcacgttcagctttgcaagcatattcaaacaatgtggttatatcaaaataatccttataatcaagtatatcctgaatttccctgttcaaaccaccacgaaaacacgccatagcagcgtcatccgactcaaccaaaccacaccgaagcatacccttttgtaactcctggtaatattcctcaacagactgtgaaccttgttgaaaatactgcattttgttaagcaaatcacgagcataataggaaggaacaaatctgtggcgcatggcagtttttaattgggtccaagtaatgacactgttaatgggaagtttttgtttatactcacgccaccaaattaaagcaaaatcagtaaattcactaatggcagccttcacttggctattagcaggaatatcatggcatgaaaatttttgttctacctctaattcccaatcaagatatgcagcgggatcatatttaccattaaaagatggaattttaaatttaatcttagaaaataagtcattagggggatgacgaaccacacgacgtgcacgaccacggcgatctccatcatcctgctcagtgtcaccgtcgtattcctgctccatctttatggccaatgcatcaaggcgtgccaggatggtgtcgagtgtggtgcgagtcgccgtttgagcaaggtcaagttggttgaaacgctcggtcgtcgaagtgatcgttgaatcaagccgttcatgcatcgtcctaatgtcagcagcaagtccatcaacttgctcccttacttcctgcaactgggcatccaccatgtcgtgtgctcttgccatagttagcgcaaacaccaaaacaccaaaaggagaaaaaaaaaccagcgacaaaaacaggggtgtactgctcacaaggcgctcacactagtgctgttatcaagttcttatccgttcttaccaagccacagtggtgaactgcaaccaacaggtggaaccggtgaaagattggatgagcgattgcctggagaaacagaaaccttctcgtcgtagaaatatgtggagttttgggtaggctgcactcaagtcaatgattagcacaatcaaacaataatgcaaagttgaattatagtgcagaacacgaaactatattgctggccacaagtgcaaaggacgaatggaactagcagaatggcagtaccgtaaatattatactagtgaggccactagtaggaatcacaagtgattttgtttttcttttttgtatgatttttttgatatttttctcagcacaagaagcaacaaaataggagctatacaaagtttcacctaaaacagagttcagatgtggtctacagaaaatcaggaagttctctgaaaagcgtgcgagaactttgatggattttttctttattttcctgaattgttttgacaattttgtcgaaaccaaatagactgaaggtgagtttggccggcctcagaatggtgtcaacaagctcctgtaaaaatttcagattttttggacacccgagcgaaaagttatgcccgttttacggcaggtacctcaatttatgctttaaaacgaccgggatgaaacaaccgtatcctttctccttcgttttcttttttttatttctgttttttttacgtaaccgaaggagaaaaacaaggaagcggccgttgactcggtttgtttttttttcgtatccgaaggagaaaaacaaggaaacgaccgttgactcggtttgtttttttctgttttttttttgacgtaaccgaaggagaaaaacaaggaaacgatgttgactcggtttgtggcgtgatcaaacgggagatggtggcggcgctagggtttgaatggtggaagaacacaatgcaaccagcaacaaatgacgcgaaagcacacaaattcaacaatgcagattattgaaagaaagtgcgagactcaaaagggtgctgggataaggtctaacctgaatttttatgtggttttgtggactgtaggaaaaaaacactcgataaactcaccgatcaacctggaaatctgataccaattgatgtagctgaggtgcccgatctttcggtgagaggagataattccgatttggcggaagatgacccttgcgatccgactacgacgagcaagcccgaggcgccaatgcaatcgctgaaccaactccctgtggttaccgaccatgctgatgcgagatcggcctgatcacgaagatcgtttcctgtgcgcaatcgaagaacgaacaagaaaaagatgcgagcaatctaatctattactcgagggtggagttctgaatacacgaagacagcgcagatttgcgcgtgttcgagagtagctaaggctaacgtaaaacaaaactcgaagaataaaggaggcgcagctcctgtttaaatagagagggggcgcagcccctaggggcggccaaccctaggtcgtccactatgggccgcagttgggctggtcatctattcttctgggccctcattcttcagtagcatgacgaagttaagatctctggcacgggcccgagtgattggcccagctaatgaaggaagtggcgcttgatgttgaggtgctgctggtgtggtcgtactcatagtgatgtcctcatcacaatcctctactttaggtccaaaactcatgtttggggtggtttcgcgcaatttcgttgccgcacgtcactcattccgaaaacgggtgtcggggtgcatacaaagcacgagtttttgccaccggaaccatttctttgtttttcgcaacgaacatgccgaatccactactttaggtccaaaactcatgtttggggtggtttcacgcgatttcattgccgcacgtcacccattccgaaaacgggtgacagggtgcatacaagcacgagtttttgccaccggaaccatttcttcgtttttcgcaacgaacatgccctccactactttaggtccaaaactcatgtttggggtggtttcgcgcaatttcattgccgcacgtcacccattccaaaaacgggagtcgaggtgcatacaaagcacgagtttttgccaccggaaccatttcttcgttttttgcaacgaacatgcccaaaccactactttaggtccaaaactcatgtttggggtggtttcgcgcaatttcgttgccgcacgtcactcattcagaaaacgggtgtcggggtgcatacaaagcacgagtttttgccaccggaaccatttcttcgttttcccatcgaacatgcgcaatccactactttaggtccaaaacacatgtttggggtcatttcacacaatttcgttgccgcacgtcacccattccgaaaacgggtgtcggggtgcatagaagcacgagtttttgccacgggaaccatttcttcgtttttcgcaacgaacatgcccaatccactactttaggtccaaaacacatgtttggagtggtttcgtgcaatttcattgccgcacgtcacccgttccgaaaacgggtgtcggggtgcatacaaagcacgagtttttgccaccggaaccatttctttgtttttcacaacgaacatgcccaatccactactttagatccaaaacacatgtttggggtggtttcacgcaatttcgttgccgcacgtcacccattccgaagacgggtgtcgggggtgcatacaagcacgagtttttgccaccggaaccatttcttcgtttttcgcaatgaacatgcccaatccactactttaggtccaaaactcatgtttggggtggtttcgcgcaatttcgttgccgcacgtcactcattccgaaaacgggtgtcggggtgcatacaaagcacgagtttttgccaccggaaccatattttcgtttttttcccaacgaacatgcccaatccactactttaggtccaaaacgcttgtttggggtggtttcacacaatttcgttgcagcacgtcacccattctgaaaacaggtgtcggggtgcatacaagcaccagtttttgccaccggaaccatttcttcgtttttcgcaacgaacatgccgaatccactattttaggtccaaaacacatgtttgggttggtttcgcgcaattttattgccgcacgtaaccaattccgaaaacgggtgtcgggttgcatacaagcacgagtttttgccaccggaaccatttcttcgtttttcgcaacgaacatgcccaatccactactttaggttcaaaacacatgtttggggtagtttcgcgcgatttcattcccgcacgtcacccattccgaaaacgggtgtcggggtgcatacaagcacgagtttttgccaccggaaccatttcttcgtttttcgcaacgaacatgcccaatccactactttaggtccaaaactcatgtttgcggtggtttcgcgcaatttcattgccgcacgtcacccattccgaaaacgggtgtcgggtgcatacaagcacgagtttttgccaccggaaccatttcttcgtttttcgcaacgaacatgcccattccactactttaggtccaaaactcatgtttggggtggtttcgcgcaatttcgttgccgcacgtcactcattccgaaaacgggtgtcgggggtgcatacaagcacgagtttttgccaccggaaccatttctttgtttttcccaaggaacatgcccaatccactactttaggtccaaaactcatgtttggggtggtttcgcgcaatttcgttgccgcacgtcactcattcagaaaacgggtgtcggggtgcatacaaagcacgagtttttgccaccggaaccatttcttcgtttttcgcaacgaacatgccgaatccactactttaggtccaaaacacatgtttggggtggtttcgcacaattttattgcagcggtttcgcgcgatttcattgtcgcacgtcacccattccgaaaacgggtgtcggggtgcatacaagcacgagtttttgccaccggaaccatttcttcgtttttcgcaacgaacataaccaatccactactttaggtccaaaacttatgtttgcggtggtttcgcgcaatttcattgccgcacggtcacccattccgaaaacgggtgtcggggtgcatccaaagcacgagttccttgccacaggaacaatattttcgtttttcgcaacgaacatgcccaatcctctactttaggtccaaaactcatgtttggggtggtttcgcgcaatttcgttgccacacgtcacccattccgaaaacgggtgtcggggtgcatacaaagcacgagtttttgccaacggaaccatttcttcgttttttgcaacgaacatgcccaatccactacttcaggtccaaaactcatgtttggggtggtttcgcgcaatttcgttgccacacgtcacccattccgaaaacgggtgtcggggtgcatacaaagcacgagtttttgccaacggaaccatttcttcgttttttgcaaagaacatgcccaatccactactttaggtccaaaactcatgtttggggtggtttcgcgcaatttcgttgccacacgtcacccattccgaaaacgggtgtcggggtgcatacaaagcacgagtttttgtcaccggaaccatttcttcgtttttcgcaacgagacaagtggtgcagcgagcaacaaatcgctccacgtctcttctcatctttggccaaaagaaatggctcgctaatatgtcttctgtcttcttcacaccaaaatgtcccatcaacccacctccatgtgcttcctgtaataataatatacgcacagaacaagctggaatgcataatttgttagcccgaaacacaaagccatcggtgagaacaaatttgttccatgtccttccttctttacattgtaaaagcacatctttgaaatcagcatcgaaagcatattgttgtttaattgtctccaagccaaaaatcttaaaatctagttgggacaacatggtgtaccgacgagacaaagcatccgcaatgacattatcttttcctttcttatgtttgatcacatagggaaaagattcaataaattcgacccacttggcatgcctacggttcagatttgtttgtctccttagatgtttcaaagattcatgatcagaatgtataacaaattctttaggccataagtagtgttgccatgtttccaaagttcgaactaaagcatataattctttatcataagtggaatagttcaaactaggaccattcagtttctcactaaaataagcaacaggcttcccttcttgcaacaagacaccacccaaaccaataccgctagcatcacattccaattcaaaagtcttattaaaatcaggtaattggagaaggggtgtatgagttaacctatccttcaaagtctcaaatgcatcctcttgcgccttaccccaagaaaatgtagcacccttcttcgtaagctcgtgcagcggccctgcgatggtgctgaaatctttcacaaatcgacgatagaacccagcaagcccgagaaagcttcggacttgcgtgaccgtggtagggactggccagctatgtattgcctccaccttagcctgatcaacttcaattccctgtggtgtcacaacatagccaagaaaagagacacggtctgtgcaaaatgtgcacttatcaaggttaccaaataagtgtgcttcacgtaaagcattaaaaacagcacgtagatgattaagatgatctactagacatttgctatagatcaagatgtcatcaaagtagacaaccacaaatcttccaatgaaagcacgtaaaacctcattcattaatctcatgaaagtactaggtgcattagtaagaccaaaaggcatgactaaccactcgtacaaaccaaacttggttttaaatgctgttttccattcatctcctagcttcatgcgaatttggtgatatccactacgtaagtcaatcttagagaaaaccatcgagccactaagttcatccagcatatcatctaacctagggataggatgacgatacctgatggtaatgttattaattgctcgacaatctacacacatgcgccatgagccatctttctttgggactagtaaaacagggacagagcaaggactaagggactcacgcacataacctttatcgagcaattcttgtacttatcgctgaatctccttggtttcttctgggttcgtcctgtatggcgctcggtttggcaaggaagcccctgggatgaggtcaatctgatgtccaattcctcttatcggtggcagcccaggtggcacttcttttggaaatacatcagcatagtcctgcaaaagattagtgatagtagaaggcaaagtagatggtatgttgtgaagtgagaacaaagcatccttgcatataaacacatagcagattgcatcaacatcgtttaattcaagtaaatcagatttggaagcaaggaaacaagcacttttcagttgtatttcatttttccttacatgagcagatttagaattatcactcttaggttgtaccaattcctttgtaacatctagattgttattatgaacagatttgtttttctctttgcatgctctagcaacttcatctttcaagatagcatcgggggacatagggtgcaaaacaagcttcttctcattatgcataaaagagtattgatttgttttaccatgatgcacggtgtccttatcaaattgccatggtctaccaaataacatagagcaagcttgcatgggtaccacatcacaatcaatataatcatggtatgaaccaattgtaaattccacacggaccatacgtgttaccttaagcttaccactatcgttgaaccattggatgtagtaggggtgtggatgtggaagcgttttcagcccaagcctctctaccatggtggtgcttgctaagttgttacagcttcctccatcaattataatacgacaagatcgttccaaaactacacatttagtttggaacaggttgtgtcgctggttttgttcagctttaataatttgggcactcaagacacgtcttacaaccaggctctcatagtgttctgcatatgatgctgatttcaaagatgtgttgctgcattgtaaagatgggaaaggatggaacaaatatatcgttagtgatgggtttgtgtttagagctaacaagctatgcattccagctagctccgttcgtttgttgttgttacaggaagcacatggaggtggcttaatgggacattttggagcaaagaaaacggaggacatacttgctggtcatttcttttggccccagatgagaagagatgtggtgagattggttgctcgttgcacgacatgtcaaaaggcgaagtcacggttaaatccacacggtttgtatttgcctctacccgttcctagtggtccttgggaagatatttctatggattttgtgctgggattgcctaggactaggaagggacgtgatagtgtgtttgtggttgttgatagattttctaagatggcacatttcataccatgtcataaaactgacgatgctactcatattgctgatttgttctttcgtgaaattgttcgcttgcatggtgtaccaacacaatcgtttctgatcgtgatgctaaatttcttagtcatttttggaggactttgtgggcaaaattggggactaagcttttattttctactacatgtcatcctcaaactgatggtcaaactgaagttgtgaatagaactttgtcaactatgttaagggcggttctaaagaagaatattaagatgttggaggactgtttgcctcatgttgcatttgcttataatcgatcattgcattctactacaaagatttgcccatttcagattgtatatggtttgttgccccgtgctcctattgatttaatgcctttgccatcttctgaaaaactaaattttgatgctactaggcgtgctgaattgatgttaaaactgcatgaaactactaaagaaaacatagagcgtatgaatgctagatataagtttgctagtgataaaggtagaaaggaaataaattttgaacctggagatttagtttggttgcatttgagaaaggaaaggtttcctgaattgcgaaaatctaaattgttgcctcgagccgatggaccatttaaagtgctagagaaaattaacgacaatgcatataggctagatctgcctccagactttggggttagccccacatttaacattgcagatttaaagccctacttgggagaggacgttgagcttgagtcgaggatgactcaaatgcaagaaggggagaatgatgaagacatccacactactgatacatctatgccaatacaagtaccaatttctggtcccattacttctggtcccattactcgcgctcgtgctcgtcaactcaaccatcaggtgattacactcttgagtgcatttccatcatatttagaccatggagacccgtgcactcttattttgcttaggaaccagggagaagaccgaaagggaaaaggatttgaacatgctggattcgaactgcagaagaacaccaacttgtgacggtcaccacggtcacatgcgggctcggattggaatgttcaagcacaacatgatgtagctgaggtgcccgatctttcggcgagtagagataattccgatttggcggaagatgacccttgcgatccgactacgacgagcaagcctgaggcgccaatgcaatcgctgaaccaactccctgtggttaccgaccttgctgatgcgagatcggcctgatcacgaagatcgtttcctgtgtgatgtagctgaggtgcccgatctttcggcgagtagagataattccgatttggcggaagatgacccttgcgatccgactacgacgagcaagcccgaggcgccaatgcaatcgctgaaccaactccctgtggttaccgaccttgctgatgcgagatcggcctgatcacgaagatcgtttcctgtgcgcaatcgaagaacgaacaagaacaagatgcgagcaatctaatctattactcgagggtggagttctgaatacacgaagacagcgcagatttgcgcgtgttcgagagtagctaaggctaacgtaaaacaaaactcaggaaataaaggaggcgcagctcctgaataaatagagagggggcgcagcccctaggggcggccaaccctaggtcgtccattatgggccgcaattgggctggtcgtctattcttccgggccttcgttctttaacaacatgatgtagttcaattctcttgcacgggcccgagtcactggcccaggtggaaggggtcgcgcctgggctggagaaggtgctgctggtgtagatgtgctcgtgttggtgttgatgtccgcatcatcctccccttcttgaactgaagtcgtcctcgacggcaactcctcattttctcccgcatacggtttcaaatctgcaacattaaaactagtggaaacaccaaactccgcaggtaggtcgagggtataagcattatcattaatcttggttagtatcttaaaaggaccagcagcacgaggcatcaatttagaacggcgcaaagtaggaaaacgatcctttctcaaatgcaaccaaaccatatcaccaggttcaaaagtaacatgttttcttcctttactaccagcaacctgattttttgtattagtagcagcaatgttctgtttcgtttgttcatggatggtaatcatttgttcaacatgtgcagaagcatctacatgtggggcgttcgcagcattaagtgaaatcaaatcaataggtgccctaggaatgtaaccataaacaatctggaaagggcacatctttgtagaagaatgcgtggcatgattgtaagcaaattcaacatgaggcaagcaatcctcccaacgtctcaaa

SEQ ID NO: 396 - DNA, 28049 bp, Zea mays
  source: /note="Zea mays BAC clone full insert sequence contig Ch4 bacm.pk184.c21.fis23"
ccgaagggcccttgttgcaactgccactgtcgataatgatgcgaatcgaccgctcctgcacaacaccctttgtatggaacagagtgtgtcgctgattcttctcgggcaaagcgacctgtgtactgagaacacgctgcacaacaagactttcatacctatcagcgtcgctcgggttgacatgtacctccgccttagctgcatggtcagtggcaagtagtgcatgttcaatttcttcagaatcactagcggaagagtactcaccatcgtcacgaatgagcaaagtgcgcttgtttgggcagtcccgaatcacatggccaaatcctctacaacgatgacactgaatatcccgtgtacgacctgtgggtggggcagtgctggctggattggtcgtcttctcgcgtggagtagtggtggacgtggatggcgcagggggaactggtgctgaggtggatgtcgagcttcgtcctgcaaaagggttagaatatggcttcgagcggcgtccctgcacttcacgttcagctttacaagcatattcaaataaagtagtcatatcataatattccttataatcaagtatatcttggatttcgcggtttaaaccaccacgaaaacgtgccatagcagcgtcgttgtcctctaatatcccacaacgaatcatacctttttgtaactcctggaaatagtcctcaacagattgagaaccttgctgaaaacgctgcattttattaagcaaatcacgagcataatacgaaggcacaaatcgatgtcgcatcgcagctttcaactgatcccaagtggttggaatggtagtgggatgttttattttaaactcacgccaccaaattaaagcaaaatcagtaaattcactaatagcagctttaacctgagaatgtgcagcaatatcatggcatgaaaatttttgttcaacctctaactcccaatcaagatatgcagcaggatcatatttgccattaaaaggtggaattttaaatttaatcttagaaaataagtcattagggggatgacgaaccacacggcgtgcacgaccacggcgatctccatcttcccactcagtgtcaccgccgtagtcctgctccatctttgtggtcaacgcatcaaggcgtgccaggatggtgtcgagtgtggtgcgagtcgctgtttgagcaaggtcaagctggttgaaacgctcggtcgtcgaagtgaccgttgaatcaagccgttcatgcattgtcataatgtcatcagcaagtccatcaacttgtccccttacttccagcaactgggcatttaccgtgtcgtgtgctcctgccatagttagcgcaaacaccaaaacaccaaaagaagaagaaaaaaacaacgacaaaaacaggggtgtactgctcacaaggcgctcacactagtgctgttatcaagttcttattcattcttaccaagccacagtggtgaactgcaaccaacaggtggaaacggtgaaagattggatgagtgattgcctggagaaacagaagcctgctcgtcgtagaaatatgtggagttctgggtaggctgcactcaagtcaatgattagcacaatcaaacaataatgcaaagttgaattatagtgcagaacacgaaactatattgctggccacaagtgcaaaggacggatggaactagcagaatggcagtaccgtaaatattgtactagcgaggccactagtaggaatcacaagtgattttgtttttcttttttgtatgatttttttgatatttttctcagcacaagaagcaacaaaataggagctagacgaagtttcaccgaaaacagagatcagatgtggtctacagaaaatcaggaagttctctgaaaagcgtgcgagaactttgacggatttttttctttattttcctgaatttttttgacaatttcgtcgaaaccaaacagaccgaaaggtcagtttggccggcctcagaatggtgtcaactagctcctgtaaaaatttcagattttttggacacccaagcgaaaagttatgcccggtttaaggaaggtacctcaaattatgttttcaaacgaccgggatgaaacaaccgtatcctttctccttcgttgttttttgtttctgttttattttttgacgtaaccgaaggagaaaaacaaggaaacgatgttgactcggtttgtttttttttctgttttttttcgtaaccgaaggagaaaaacaaggaaacggccgttgactcggtttgtttttttctgtttttttttacgtaaccgaaggagaaaaacaaggaaacgatgttgacttagtttgtggcgtgatcaaaggggagatggtggcggcgctagggtttgaatggtggaagaacacaatgcaaccagcaacaaatgacgcgaaagcacacaaattcaacaatgcagattattgaaagaaagtgcgaggctcaaaaggtgctgggataagatctaacctgaatttttatgtggttttgtggactgtaggaaaaaaacgctcgataaactcaccgatcaacctggaaatctgtcggggaccataattaggggtaccctcaagacgcctaattctcagctggtaacccccatcagcataaagctgcaaaggcctgatgggtacgattaagtcagggatcagtccacacgagtgacttgatcacgcttcgctcgtgcctagcctcggccaagggcagccgacctcgagagacttccgtctcgcccgaggcccccctttttaacggcggacgcacctccggctcgcccgaggccttggcttcgcctagaagcaaccctgactaaatcgccgcgccgactgaccaggttgcaggagcatttaacgcaaaggtggcctgacacctttatcctgacacgcgccccccagcagagccgaagtgaccgccgtcactccaccgctccactgaccagtctgacagaagaacagcgccgcctgtgccacaccgactacagtgccactcgacagagtgagtctgacaggcagtcaggccctgccgaaggcgccatgggaaactccgctccgcctgaccccagggctcggactcgggctaagacccggaagacggcgaactccgctccgcccgaccccagggctcggactcgggctaagacccggaagacgacgaactccgctccgcccgaccccagggctcggactcgggctaagacccggaagatggcgaactccgctccgcccgaccccagggctcggactcgggctaagacccggaagacggcgaactccgctccgcccgaccccagggctcggactcgggctaagacccggaagacgacgaaactccgcctcgcccgaccccagggctcggactcgggctaagacccggaagacgacgaaactccgcctcgcccgaccccagggctcggactccgccctggcctcggccaaacgatctccgcctcgcccgaccccagggctcgggctcggcctcggcaacggaagacagactcgacctcggcttcggaggagcccccacgtcgccctgcctagggcacaggcccgccacgtcaacaggaagcgccatcatcgtcctaccccgaatcgactcgggtcacggagaacaagaccggcgtcccatccggccagctccgccggatgggcaatgatggcgctccacgagctctgtgacgacggcggccctcagctctcttacggaagcagggcgacgtcaacaaggacccgaccgctccaacagctgtccctccgccaggctccgtcgctcctccgacagccacgacatcacgccagcaaggtgccaagacctctccggctgccacattggcatgtacctagggcgctagctctctctccgctagacacgtagcactctgctacaccccccattgtacacctggatcctctccttacgattataaaagggaggaccagggccttcttagaggaggttggtcgcgcgggaccgaggacgagacaggcgctctcttggggccgctcgcttccctcacccgcgtggacgcttgtaacccccctactgcaagcgcacccgacctgggcgcgggacgaacacgaaggccgcgggacctccacctctctcacgcccgtctccggccacctcgcctctccccccttcgcgctcgcccacgcgctcgacccatctgggctggggcacgcagcacactcactcgtcggcttagggacccccctgtctcgaaacgccgacagttggcgcgctaggtaggggcctgctgcgtgctgacgaacagcttcccgtcaagctccagatgggcagtctccagcaacctctccggcccgggacggtgcttcgtttcgggactcttgagttcatgtccttcgacggcagctacgacatgatactccttcctccgccgcgcgacaacgacaatggcggccgacaacccgcccgccggcggcggaatcggcgacatcttccccgcgtggtggaagaacaacatccgagctcgctccgtcccctcccccgccaacggaggaggaggcgaggcaaccaaggccaagcgggaggccgcgcttcgtcgactgtcgagcgaatcgacgtccccagcgccccgatggaaggcacgccgggcgtcgacctcgcattcgagacggaggcaggcgtcgtccccccacgacacgctgatctcaagcaagaagacgacgccaacgcgctcgtggaaagcctgcaggacgtcgccctcgtacctgagacgacggtgcaaccagtccccgatgtgactacgtcgctcctcgtcgaccaaaaggtaccgactaactcctatcttacgtcatttcgactcggcctcaacccgccaaacgacctcgctttggcgggcgctctcatcgaggcgagtgcaaccccactggggtttcgtatgcggtcgccttgggaccggttgacggacgtctcaacctacgggccctctgggtccgaggaagatgacgatcccagcatctgttgggatttctccggacttggcaaccccagtgccatgcgggacttcatgaccgcatgtgactattgcctctccgactgttccgacggaagccgcagccttggcgacgagagctgcggcccaagacgcgaatgtttccacatcgagctaggggatccctccgaaggcaaccatctcggcatgccggaggacggtgatcttcctaggccggtgcctcgcgccgacatcccacgggagctagctgtggtccccgctccggcggggggttacgacccacaactcgagcaagtccgcgaggcgcaggccaggctcaatgagggaacaggagcgcttgagccgatccgtcgggacgtcgggcaggtatgggcgggccaacccccggccggagaaatacgtcacctgccccaaggtctccagcaccgcgtcgccaacgatgtcagggtcaggccgccgcccgcatctagcggggttggccagaacctggcagccgcagcgatgctcctccgcgcgatgccggagccatcaaccaccgagggtcggcgaatccagggagagctcaagaatctcctggaaggcgctgcggcccgacaggccgagagcactgcctcccgaaggcaggggtacccctcggaacctcatgacgcgacttcccgattcatgcgggaagcctcggtctacaccgggcgcacgcgtaacaccgcgcctgcggccccgggccacctcggcaacgagcaccatcgacgcgaccgtcgggcccacctcgacgaaagggtgcgccgaggctaccaccccaggcgtggggggcgctacgacagcggggaggatcggagtccctcgcccgaaccacccggtccgcaggccttcagtcgggccatccgacgggcgtcgttcccgacccggttccgacccccgactactatcacgaagtactcgggggaaacgagaccggaactgtggctcgcggactaccgccttgcctgccaactgggtgggacggacgacgacaacctcatcatccgtaacctccccctgttcctctccgacactgctcgcgcctggttggagcacctgcctccggggcagatctccaactgggacgacttggtccaagccttcgccggcaatttccagggcacatacgtgcgcccgggaaattcctgggaccttcgaagctgccggcaacagccgggagagtctctccgggactacatccggcgattctcgaagcagcgcaccgagctgcccaacatcaccaactcggatgtcatcggcgcgttcctcgctggcaccacttgccgcgacctggtgagcaagctgggtcgcaagacccccaccagggcgagcgagctgatggacatcgccaccaagttcgcctctggccaggaggcggtcgaggctatcttccgaaaggacaagcagccccagggccacccatcggaagaggctcccgaggcgtctgctccgcgcggcgccaagaagaaaggcaagaagaagtcgcaatcgaaacgcgacgccgctgacgcggaccttgtcgccgccgccgagcacaagaaccctcggaagccccccggaggtgcaaacctcttcgacaagatgctcaaggagccgtgcccctaccatcaggggcccgttaagcacaccctcgaggagtgcgttatgcttcggcgtcacttccacagggccgggccacccgccgagggtggcagggcccgcgacgacgacaagaccgaagatcaccaagcaggagaattccccgaggtccgcgactgcttcatgatctacggagggcatgcggcgaatgcctcggctcggcatcgcaagcaagagcgccgggaggtctgctcggtgaaggtggcggcgccagtctaccttgactggtccgacaagcccatcaccttcgaccaggccgaccaccccgaccatgtgccgagcctggggaaatacccgctcatcgtcgaccccgtcgtcggcaacgtcaggctcaccaaggtcctggtggatgggggcagctgcctcaacatcatctacgccgagaccctcaagctcctgcgcgtcgatctgtcctccgtccgagcaggcgctgcgcccttccacgggatcatccctgggaagtgcgtccagcccctcggacgactcgacctccccgtctgcttcgggacgccctccaacttccgaagggagaccctgacgttcgaggtggtcgggttccgaggaacctaccacgccgtactggggaggccatgctacgcgaagttcatggccgtccccaactacacctacctaaagctcaagatgccgggccccaacggggtcatcaccgtcggccccacgtacaaacacgcgttcgaatgcgacgtggagtgcgtggagtacgccgaggccctcgccgagtccgaggccctcatcgccgacccggaaaacctctccaaggaggtgccagacgtgaagcgccatgccggcaacttcgagccagcggagacggttaaggccgtccctcttgaccccagcggggacacctccaagcagatccggattgggtccgggctcgaccccaaataggaagcagtgctcgtcgactttctccacgcaaacgccgacgtctttgcgtggagtccctcggacatgcccggcataccgagggatgtcgccgagcactcgctggatattcgggccggagcccgacccgtcaggcagcctctgcgccgattcgacgaggagaagcgcagagtgataggcgaggagatccacaagctaatggcagcagggttcatcaaagaggtattccatcccgaatggcttgccaaccctgtgcttgtgaggaagaaaggggggaaatggcggatgtgtgtagactacactggtctcaacaaagcatgtccgaaggttccctaccctctgcctcgcatcgatcaaatcgtggattccaccgctgggtgcgaaaccctgtccttcctcgatgcctactcagggtatcaccagatccggatgaaagagtccgaccagctcgcgacttctttcatcacgccattcggcatgtactgctatgtcaccatgccgttcggtttgaggaatgcgggcgcgacgtaccagcggtgcatgaaccatgtgttcggcgaacacatcggtcgcacggtcgaggcctacgtcgatgacatcttagtcaagacaaggaaggcttccgacctcctctccgaccttgaagtgacattccgatgtctcaaggcgaaaggagtcaagctcaatcctgagaagtgtgtcttcggggtgccccggggcatgctcctggggttcatcgtctctgagcgaggcatcgaagccaacccggagaagatcgcaaccatcaccagcatgggacccatcaaggacttaaaaggcgtacagagggtcatgggatgcctcgcggccctgagccgcttcatctcacgcctcggtgaaagaggtctgcctctgtaccgcctcttaaggaaggctgagtgtttcgcttggacccctgaggccgaggaagccctcgggaacctgaaggcgctccttacaaaggcgcctgtcttggtgcccccggcggatggagaagccctcttggtctacgtcgccgcgaccactcaggtggttagcgccgcgattgtggtcgagaggcaagaggaagggcatgcactgcccgttcagaggccggtctacttcgtcagcgaagtgctgtccgagaccaagatccgctacccacaagttcagaagctgctgtatgctgtgatcctgacgaggcagaagttacgacactacttcgagtctcatccggtaactgtggtgtcatccttccccctgggggaaatcatccagtgccgagaggcctcgggcaggatcgcaaagtgggcggtggaaatcatgggcgaaacgatctcgttcgcccctcggaaggccatccagtcccaggtgttggcggacttcgtggccgaatgggtcgacacccagctgccgacggctccgatccaaccggagctctggaccatgtttttagacgggtcgctgatgaagacaagagccggcgcgggcctgctcttcatctcgccccttggaaagtaccagcgctacgtgctacgcctccatttcccggcgtccaataatgtggctgagtacgaggctctggtcaacgggttgcggatcgccatcgagctaggggtcagacgcctcgacgcccgcagtgactcgcagctcgtcatcgaccaagtcatgaagaactcccactgccgcgacccgaagatggaggcctactgcaatgaggttcgacgcctggaagacaagttcttcgggctcgagctcaaccacatcgctcggcgctacaacgagactgcagacgagctggctaaaatagcctcggggcgaacgacggtccccccggacgtcttctcccgggatctgcatcaaccctccgtcaagatcgacgatgctcccgagcccggggcaccctcggcacagcccgaggcaccctcggtacagcccgaggcaccctcggcccccgagggtgaggcactgggcgtcgaggaagagcagagcggggccacgcctgatcgagattggcaggccccgtacctgcaatatctccgccgaggagagctaccccccgaccaagccgaggctcggcgggtagcacgacgcgccaagtcgttcgtcttgctgggcgacgaggaggagctctaccatcggagcccctcgggcatcctccagcgatgcgtctccatcgccgaaggtcaggaactcctgcgagaaatacactcgggggcttgcggccatcatgcagcgcctcgagcccttgtcgggaatgctttccggcaaggcttctactggccaacagcggtggctgacgccactagaattgtccgcacctgcgaagggtgccaattctatgcgaagcagacccacctgcccgctcaggctctacagacgatacccatcacctggcccttcgctgtatggggtctggacctcgtcggtcccttgcagaaggcgcccgggggctatacgcacctgctggtcgccaccgacaaattctccaagtggatcgaagtccgacccctgaacagcatcaggtccgagcaggcggtggcgttcttcaccaacatcatccatcgcttcggggtcccaaactccatcatcaccgacaacggtacccagttcaccggcaaaaaattcttggatttttgcgaggatcaccatatccgggtggactgggccgccgtggctcatcccatgtcgaatgggcaagtagagcgtgccaacggcatgattctacaagggctcaagcctcggatctacaacgacctcaacaagttcggcaagcggtggatgaaggaactcccctcggtgatctggagcctaaggacgacgccgagtcgtgccacgggtttcacgccgttcttcctggtctacggggccgaggctatcttgcccactgacctggaatacggctccccgaggacgagggcctacaccgaccaaagcaaccaagctagccgagaagactcgctggaccagctggaggaggctcgggacagggccttactacactcggcgcggtaccagcagtccctgcgacgctaccacgcccgaggggtccggtcccgagacctccagatgggcgatctggtgcttcggctgcggcaagacgcccggggaaggcacaaactcacgcccccctgggaggggccattcgtcatcgccaaagttctgaagcccggaacatacaagctggccaacaatcaaggcgagatctacggcaacgcttggaacatcaaacagctacgtcgcttctacccttaagatgtttccaagttgttcatatacctcgcacctacgcaaagtttagtcgtcaaggaagggtcgacctagcctcggcaaagcccgaccctccctcgggggctaaaaggggggagaccccctctgcgtcgaatttttcctcgaaaaaggatctctttttagcaggatttctttcgtgcttcttgactacttcggaaagcggatcctggaaacgacggagtacacgtaagcagccaaggctgaccgagccgagggactcctacgcctccgggatacggatacctcactcatcaccttctgcgataagtaactcgcgttcggataaagcgactccgtggaccgaacaagtcttcacgttcggaagctctcctgccgaagcagtccttcaagctttctcgactaagtcggggacagggcctcacggatgggtgaaagtacgcgtaagcggcaaggccgaccgagccgagggactcccacgcctctgggatacggatacctcactcgtcccttccgcgagaagcaactctcgcccacacaaacatccctgttaccggcagagagtccagatgctcgaaacaagaggaaaaagacgcagctttgcaagcacggcgagggtgtgttttctggcctcggcggccgcagaaggcacacgctacatgacgatctgatcctgcaggctcgggtcttcacgctgaagggagccgtagcaccctcggcatcgacggcgtcttcagcaaagtccgacccagcctcggatggcggcgcgatcagagactcctctgggaatccggcccgagcaggcggctcggccggttacccctggggcctcggccgaccggcttccaagggcgccagcccgacccgaggcctcggctgatcgactccggcgtcggctccgctgacggacaacccggctaggctccggccaaccaggttcccattctcgagccaactccgcctctgttcatactggtatcgctacccctggcctcggctcatcgaagagcggccgaggggtctctttaactaagctagaggagccccagacaacaaggccgatcaagccgagggattcctacgcctccgggatacggatacctcactcgtcaccttgacacggggcgactcatgcttggtgaagcggttcagataatcaacaggcgagacttagtgctcgaaaataaggaaaaacacggctccgtgccgaaattacatacatgttcaggcctcgacagccacaatgaacaaaaaacactggcattcgaagtgccattacaaacggaactccggttcccctccgcaggtacgaacaaccccactccgagggggaaggcctgcggagcaacagaagaatgatgagcggctcgctgccgcccgttctaaccatgacgacaaccacccccgccccgggcagcgaagcggcttaggcagcggcttcggggcaggtgccacgacaggagggctctcccccgctgaggacgagaaccagccattcaggccgggaggcggagacccagggccactggcgccctacctgtcccgacatggctggaggaagtccccatgggactcaaggacgccattctcccccaggcatggggagaagaaaaaggcagccgactcatgcgggggcagccccctgactcgcctcatcttccatcttggcctggatgacgaaaatccttgaggccgagggaggagtagaggccgcagcctggcccgctttccccaccgtcgaactggaggtcaccatcttgggtgaccgccggtggcggggtgcggccaggctgcgtgatgaaaatccttgaagccgaacgatggctgagaggtaccaactcccatggagttgcgttcctccaacgaggaggcggaaaggcggcggataccccccatccgggggcttggaagatggaaagacacgacgcataagggaggaagaaaacatggttgccttctgaaaggagtctccctccttttaaaggcaactctccctacgtgcgcccccagacgccacgagctgagtcttctccaacacgctccaaggccctcccctgcggctcggggggctgggtcccgcatgtcatgcaaaccggctcagagtagaagaagccaaaccgccgcgcgtggtgcgcacaaccgcccagcggttacaagcgaccccccacttttgcccagaccaacgggcggaaggggcgggcagccatgcaggcggcatgcaaccgcgccaggtggacgcgcttctccgacttctgacacgccagcttggaggcccaggcccacgcgtcaagcaaccggcgcgccagttgctgcatgcaagcaaccgcaccgccacttgtgccaccgtcgcacctcttcgattgcggagcctgtgccgcgactcgaggcgacccagcgcgcgacccagcagcgccagcctggcgcgttggtcaaagcggccgaaagtgggccggcagtaatggcggtggcaggcgggcgggcgcagcagtcacgtcgtcagccaggctcacgtcccatcctgggacagcaagagagcctcctcccacggcgtgaagacggtgcacccgtgatccgttcctcgaacggctcgcgcacgcgtaacggccgccccgccaaccactcgccccgtcgcattaactccgcggcgggacgggcggcgattctggcaggagaagcggacgacgcttcgccttcgccgcaataaccgcgtcaaaaaaggtacgccacgtcgtttgatttcgtatccttttcctttttcctctttctctatctcttgcaatagggaccgggaaagggggataccccgaaaaggatccttctctgcgaaggaaccgggctccgagcccctccctactgatcagaggttcgaagactggccctccgaagggttcaacagtcgcctcagatcgcgtgggcccgacacccactactggtcaggggttcgaaggccagccccccgaagggttccatggccgcctcaggctactcaggctccgcgcccactactgatcaggggttcgaaggctggcccccaaagggttcacagtcgccttagacaccgagcgagggatgaccaggggtacgttcgatacataaccgaggctcgggctgcgctcccgaggtaccctaggacatttccgagaccagcgggagcgatcttgtaacggaatcccatcggagggaggcatcgagccctcggaccccgtcgccaggggaccgggtccggcaaatcacccgcaggtacttttgggcgtgcctctgggcccctagccgacccccaacgaacggggcacggacgtccactcggattacccgcttgcagctcaccggagacaccatgttcggtgcccatcgagggtaacatggcgcactcccccccctcctccttgtggaaaggcgacgtaggggcgtatgtaaaaaagccgagtctgtccctgatcgtcctctcgccctgtgcagaggctcgggggctgctctcgcaaacccggctccggccaaaccgttgacagcgtcaacataccagcccgagagcttgggccccgaccgtgcacccgggctacggccagttcgcatgagggaacgaccagaccagccgaagcattacgcaaggcattaagacctcgaaggagtgtaaccactcctccgaggcctcgggggctacacccggcgggtgcgctcgcgcgcacccaccggaacgaaatgcaaccgagaaaggctggtccccttgcaaaaaagtgcgacggaagcctccaagcgagtgctatcactcccttcgaggctcgggggctactgtcggggaccataattaggggtaccctcaagacgcctaattctcagctggtaacccccatcagcataaagctgcaaaggcctgatgatgtgcacccgttgggtgattgcccgatctttcgatgagagggtgtggaataactcgattgggggaggagacgacgttcacggcccgactacagccttccaaagacgctgcgccttagcaaccgatacaccacctcctatggctgtcacgatcttgtggagcgtgacaccctggccactagggcactcgtcctgcaagcaatcgaagaactagcaagaacaagtagaacaagtactgaattaccagatctaaatgtaggtttaaagatcaaactacaatatggtggggttccgaagacaagaagacgggcggctgaactagcacgcgcgcttgcaagcaagtagcgagagctaaacttgatctaaacaaaacccgctgttcttggtggcggctagggggtttataaacatgggaggacgaccacaagggtattggggtcgtgctgcaaccctaggatgcgtccctaatggacctaacttgatacacgacccattgggccaaaatagggtgacgcagcaccatgggcagaaaaggcaggaaatgtctcggtaagaaaacaatgattacggcggcctcagaacagatatgactataattccggatccatatgaaagtagacttgataagctttccatgttgtgcttgaacattccaatccgagcccgcatctgaccgtggtgaccgtcacaagttggtgttcttctgcagtccgaatccagcatgttcaaatccttttccctttcggtcttctccctgattcctaagcaaaacaagagtgcacgggtctccatggtctaaatataatggacatgaactcaagagtgtaatcacctgatggttgagttgacgagcacgagcgcgagtaatgggaccagaaattggtacttgtattggtatagatgcatcagtagtgtggatgtcttcatcataacctttgtcgagtagttcttgcacttgtcgctgaatttcttttgtttcctctggatatgtcctatatggcgcacgattcggcaaagatgcaccaggaataagatcaatttggtgctcaatccctcgtataggtggcagcccctctggtatctcacttggaaatacatcagaatactcctgcaaaatgttagtaataacaggaggcaaagaatgctgcatatcttgaattgaaatcaaagcatccttgcataccaaggcgtaggcaacagtagtggaagcaaataattcattaacatcagtttttgttgcaagcaagcaatgtcctttcaattttatcccatctttgttattaccaacagctttaatattcttgttgttctcagttttagctttggtagctttagcaacatcatcacgcacaatagcctcaggggacatgggaagcaaaataattttcttatcatggtgtatgagagaatattgatttgatctaccatgatgcatacaatctgaatcaaattgccatggtctacctagcagaatattacaagcatccataggcacaacatcacagtcaacaacatcacgatatgaaccaatagcaaaattaattcgtaccagcttggttaccttgaccttaccactattgttgagccattgaatgtgatatggatgcgggtgcagtttggtcgtaagtgtaagcttctctaccatgtcgctgctagccaagttgttgcagctacctccatcaatgatcaaacgacatgaacgctccttaatgacacactttgtttgaaacaacgtatgtcgctgattctgctctgccttctccatttgtgcactaagcacacgctgtacaatgaggctctcataatgctctgcatcatctgcaccaatctgttcttcgggtggttccttagtgcctgcatcatcagccgcaagcaaagcaagtgtagcttcatccaaatcactagcagaggaatacccaccatcgtcttttaccaccaaaacacgctgattaggacaatcacgctgcacgtgtccatagcccttgcatcgataacacagaacatctcttgttctacctgtggaagctactgaagaggcactacctgcgggtttctgggcagatttggttgctgaatttgtggaagatgcacgtggtttgtcgctggaggaaggcgggggtgctggtcgacttggcgaaggagttggtgctggtgtacggccggtcatggacgtagtcgtgcgctgttgccatggtgtagattttcctgcagaaacattagaccttgcactagcacgtcgtccctgcacttccctttcagctttgcaagcaagatgaaacaatcgggttacattagcataatctttataagcaaggatgtcctgaatttccctatttaacccgcccaaaaatctagccatagcagattcctcaccctcctctatgttacaacgcagcatacccatttgtaattcctgataatattcttctacacttttagtaccctgtctcaattgttgcaacttgtttaacatatcacgtgcataataagaaggaacaaatctagcctgcatgacccgtttcaacgcatcccaagtttgtggcatgttattaggattcttcttaccatgttctatccaccaaacagaagcaaattcagtaaactcactagtagcagctctaacccgcgcattctcaggaaattcatggcatgcaaacttttgatcaaccgcaatctcccaagtaatgtaagcatcagggtcatatttaccatcaaaaggaggtattttaaatttaaccttactaaaagcatcatcattaccatgtacctcacgtcggcgaaaaccacccatacctctacggttagtacgtagtcgccggcgattaggtgcttcttggtcatcttgttcagtatcagcaacatagtcatcccagttaccttcggcgccttcatcacgcccaccattgatattagcatgcatctcatcaaaccgcctcaagagtgcgacaaggctcttgtcaatatgagcaactgtcatttccacatttgcaagtttggtgttcgtgtcgatctgtgtggcctccaattgccccatcttttcattcgtcacctgcatgtcattatcaagaccttccgtgtgcgtcttcaccagccttacaaagtgttgtatgatacccttggtgcgaggagagtgtggcatattacgagaagcatcatcaacctccaatcctgccatggttagacgaacagaggcaacaagaaaaaaaacgtgaaggaatgaaaactctacaactattaggatgtagctactgcaaggcgctcactctcaacctgccacacaagctcttaccaattcttaccttgcacaacaggaggggtcagcaaccaacaagtctgcaaccgtggaataagtgtattggtgccgcagcaacacgacctgtcaaactgtagtcgaaatatgtagagttgtaggtgggctgaagcaaggaatacactagtaccacgttagttacaaaagcaagctgaataatcgttcaacggtggtactgtgctggtcctaggctaaaccaggctagagacgtgagcctaggcacaaaggtagtcactgaaaaagaacaactagcacagcacaaagagaattaacagattaagagattcagcccccttcttcttcttttgcttttttttcttttctattcttttttttctttcttcttcttctgttttttttgcaggggcctaaacccttttttttactatgacaacccaaacaataaagatattgctaacagcccctttaaatcagatttaacaaatcttgttaatatagaaagtccagaaatctctacgatgattgcggagcgctcagaacgaattttgagataaggtcagatccgttggaaagaagataagataagctttccagattgtatttaaacttccaaatcggatatgatatgtatccgtggtggcaaaaacgaaccagagatgtttttggtgatggtggatctcgtggtgaccaaaacgtggtagaactcaaaactctaaaggaataaactaagaccagcaactcgacacaaccgatgcaaccaaaaactcaacaagccctaactaagtagtactagtaaatgctcaatggtttataggattgcggtaaaactaatctactattttttggctttttctggactataggagataagaaaacagcgaagaaaagtaaatctctcaccgataaaccttgctttgataccaactgatgtgcacccgttgggtgattgcccgatctttcgatgagagggtgtggaataactcgattgggggaggagacgacgttcacggcccgactacagccttccaaagacgctgcgccttagcaaccgatacaccacctcctatggctgtcacgatcttgtggagcgtgacaccctggccactagggcactcgtcctgcaagcaatcgaagaactagcaagaacaagtagaacaagtactgaattaccagatctaaatgtaggtttaaagatcaaactacaatatggtggggttccgaagacaagaagacgggcggctgaactagcacgcgcgcttgcaagcaagtagcgagagctaaacttgatctaaacaaaacccgctgttcttggtggcggctagggggtttataaacatgggaggacgaccacaagggtattggggtcgtgctgcaaccctaggatgcgtccctaatggacctaacttgatacacgacccattgggccaaaatagggtgacgcagcaccatgggcagaaaaggcaggaaatgtctcggtaagaaaacaatgattacggcggcctcagaacagatatgactataattccggatccatatgaaagtagacttgataagctttccatgttgtgcttgaacattccaatccgagcccgcatctgaccgtggtgaccgtcacaagttggtgttcttctgcagtccgaatccagcatgttcaaatccttttccctttcggtcttctccctgattcctaagcaaaacaagagtgcatgggtctccatggtctaaatatgatggacatgaactcaagagtgtaatcacctgatggttgagttgacgagcacgagcgcgagtaatgggaccagaaattggtacttgtattggtatagatgcatcagtagtgtggatgtcttcatcacctgatgggtacgattaagtcagggatcagtccacacgagtgacttgatcacgcttcgctcgtgcctagcctcggccaagggcagccgacctcgagagacttccgtctcgcccgaggcccccctttttaacggcggacgcacctccggctcgcccgaggccttggcttcgtctagaagcaaccctgactaaatcgccgcgccgactgaccaggttgcaggagcatttaacgcaaaggtggcctgacacctttatcctgacacgcgccccccggcagagccgaagtgaccgccgtcactccaccgctccactgaccagtctgacagaagaacagcgccgcctgcgccacaccaattacagtgccactcgacagagtgagtctgacaggcagtcaggccctgccgaaggcgccatgggaaactccgctccgcccgaccccagggctcggactcgggctaagacccggaagacggcgaactccgctccgcccgaccccagggctcggactcgggctaagacccggaagacgacgaactccgctccgcccgaccccagggctcggactcgggctaagacccggaagatggcgaactccgctccgcccgaccccagggctcggactcgggctaagacccggaagacggcgaaatccgctccgcccgaccccagggctcggactcgggctaagacccggaagacgacgaaactccgcctcgcccgaccccagggctcggactccgccctggcctcggccaaacgatctccgcctcgcccgaccccagggctcgggctcggcctcggcaacggaagacagactcgacctcggcttcggaggagcccccacgtcgccctgcctagggcacaggcccgccacgtcaacaggaagcgccatcatcgtcctaccccgaatcgactcgggtcacggagaacaagaccggcgtcccatccggccagctccgccggatgggcaatgatggcgctccacgagctctgtgacgacggcggccctcagctctcttacggaagcagggcgacgtcagcaaggacccgaccgctccaacagctgtccctccgccaggctccgtcgctcctccgacagccacgacatcacgccagcaaggtgccaagacctctccggctgccacattggcatgtacctagggcgctagctctctctccgctagacacgtagcactctgctacaccccccattgtacacctggatcctctccttacgactataaaagggaggaccagggccttcttagaggaggttggccgcgcgggaccgaggacgagacaggcgctctcttggggccgctcgcttccctcacccgcgtggacgcttgtaacccccctactgcaagcgcacccgacctgggcgcgggacgaacacgaaggccgcgggacctccacctctctcacgcccgtctccagccacctcgcctctccccccttcgcgctcgcccacgcgctcgacccatctgggctggggcacgcaacacactcactcgtcggcttagggaccccctgtctcgaaacgccgacaaaatctgataccaattgatgtagctgaggtgcccgatctttcggcgagtagagatatttccgatttggcggaagatgacccttgcgatccgactacgatgagcaagcccgaggcgccaatgcaatcgctgaaccaactccctgtggttaccgaccttgctgatgcgagatcggcctgatcacgaagatcgtttcctgtgcgcaatcgaagaacgaacaagaaaaagatgcgagcaatctaatctattactcgagggtggagttctgaatacacgaagacagcgcagatttgcgcgtgttcgagagtagctaaggctaacgtaaaacaaaactcaaggaataaaggaggcgcagctcctggataaatagagagggggcgcagcccctaggggcggccaaccctaggtcgtccattatgggccgcagttgggctggtcgtctattcttccgggccttcgttctttaacagcataatgtagttcaattctcttgcacgggcccgagtcactggcccaggtggaaggggtggcgcctggactggggaagatggtgcctgggctggagaaggtgctgctggtgtagatgtgctcgtgttggtgttgatgtcctcatcaaacatgcccaatccactacttcaggtccaaaagacatgtttggagtggtttcgcgcaatttcattgccgcacgtcacccattccgaaaacgggtgtcggggtgcatacaaagcacgagtttttgccaccggaaccatttcttcgttttttgcaacggacatgcccaatccactactttaggtccaaaacacatgttaagagtggtttcgcgcaatttcgttgccacacgtcacccattccaaaaacgggtgtcgggggtgcatacaagcacaagtttttgccaccggaaccatttctttgtttttcgcaacgaacatgcccaatccactactttaggtccaaaacacatgttaagagtagtttcgcgcaatttcgttgccgcacgtcacccattccgaaaacgggtgtcggggtgcatacaaagcacgagtttttaccaccggaaccatttcttcctttttcacaacgaacatgcccaatccactactttaggtccaaaacacatgtttggggtggtttcgcgcaattttgttgccgcacgtcacccattccgaagacgggtgtcggggtgcatacaagcacgagtttttgccaccggaaccatttcttcgtttttcgcaacgaacatgcccaatccactgttttaggtccaaaactcattttggggtggtttcgcgcaatttcgttgccgcacatcactcattccgaaaacgggtgtcggggtgcatacaaagcacgagtttttgccaccggaaccatattttcgtttttcccaacgaacatgcccaatccactactttaggtccaaaacgcatgtttggggtttcgcacaatttcgttgcagcacgtcactcattccgaaaacgggtgtcggggtgcatacaagcacgagtttttgccaccagaaccatttcttcatttttcgcaacaaacatgcccaatccactattttaggtccaaaacacatgtttggggtggtttcccgcaattttattgccgcacgtcaccaattccgaaaacgggtgtcggggtgcatacaagcacgagtttttgccaccggaaccatttcttcgtttttcgcaacgaacatgcccaatccactactttaggtccaaaacatatatgtttggggtggtttcgcgtgatttcattgctgcacgtggtgcattccgaatacgggtgtcggggtgcatacaagcacgagtttttgccaccggaaccatttcttcgtttttcgcaacaaacatgcccaatccactactttaggtccaaaactcatgtttggggtggtttcgcgcaatttcattgccgcacgtcacccattccgaaaacgggtgtcggggtgctgatgaacccaacgggtagaagggtgcccgatctttcgatgagagatgatggaggtggaaaaacttgctggagaacgacgttggctgcccgacacacgcgtttacaaggaagtagcaaaggctaaacttacatcaaacaaaacccaagttctttggtggctgctagttgcttaaatagagaaataggaagaaggaattctggtggagtcatgaagttccctcggcagttcctggacgcctcgggtgtagtctcccattaattcttgatccaccagcaagtagacgaagggagctttccacaaagtatttatttgcattaaacgactttggaagttggaagatatgccccatttaaacttgtacttgatgctgttacgaaatcctctcgggtgcagcaacctttattgccttgttgccttctccagtccaagatggttcacctcccaaacacctgagcataataaagtcatcacaaggctttagtacctcatttaaagaagaattagcttcaatagcaaggaacgagttcacctgataattaagtttacgtgcacgggctcgtgtcattggtccttgattagctacgaatggtgaagtggtcactggtatggttgtatcaatgatagtgatgtcctcatcatcctccccttcttgcaacaaagtcgtcctcgactcaaacgtgtcattctctctcaagtatggtgttaaatctgcaatgttaaaagaggaactgaccccaaaatctgcatgcaactgaactttatatgcattatcattaattttgtgaagcactttgaagggtccagcagctcttggttgtaatttagatttgcgtatatcagggaatctatctttccttaaatgcacccatactaaatcaccaggttcaaaggtaatatgctttctacccttgctacctgcttcttcatacttagcattcatggctttaatatttgctttagtttgttcatgcagctttataatcagctcagcacgacgagaagcatcaaaattcattatttcagaatgtgggatggcgataagatcaataggaggcaaattcaatgtgaggcaaacattcttcccacaattttaaaagggcatagtttagttgtagaatgctgagaacgattataagcaaattcaatgtgaggcaaacattcttcccacaatttgatgttatgtttcagaacagccctaagcatggtagataaactatggtttacgacttcggtttgtccatcggtttgagggtgacaagtagtagaaaagagcaatttagttcctaacttagcccataccgttttccaaaaatgactaagaaatttggtatcccgatcggacataatagtgtttggaaccccatgcaaacgaacaacttcacgaaagaacaaatcagcaacatgggtagcgtcatcagttttgtgacatggtataaagtgtgccatttttgaaaatctgtccacaacaacaaaaatactatccctccctttctttgttctaggtagccctaaaagaaagtccatagaaatatcctcccatggtgcactaggaactgggagaggcatgtataaaccatgtgaattaaggcgagacttagctttttgacatgtagtgcagcgagcaacaattcgctccacgtctcttctcatcttcggccaaaagaaatggctggccaggatgtcttctgtcttcttcacaccaaagtgtcccatcaacccaccgccatgtgcttcctgtaataataatatatgcacggaaccagctggaatccataatttgttagcccgaaacacaaagccatctgtgagaacaaatttgttccatgtccttccttctttacaatgtaatagcacatcattgaaatcagcatcgaaaacatattgttgtttaattgtttccaagccaaaaatcttaaaatcaagttgagacaacatggtataacggcgagacaaggcatctgcaatgacattatcttttcctttcttatgtttgatgacatagggaaaagattcaataaattcgacccacttggcatgcctacggttcagatttgtttggctccttagatgctttaaagattcatgatcagaatgtataacaaattctttaggccataagtagtgttgccatgtttccaaagttcgaactaaggcatataattctttatcataagtggaatatttcagacagggtccattcagtttctcactaaaataagcaacaggctttccttcttgcaacaagacaccacccaaaccaataccactagcatcacattccaattcaaaagtcttactgaaatcaggtaattggagaaggggtgtatgagttaacctatccttcaatgtttcaaatgcaacctcttgcgccttgccccacgaaaatggagcacccttcttagtaagctcgtgcaatggccctgcgatggtgctgaaatctttcacaaatcatgatagaaccccgcaagcccgagaaagcttcggacttgcatgaccgtggtagggactggccagctatgtatggcctccacgttagcctgatcaacttcaattccctgcggtgtcacaacatagccaagaaaagagacccggtctgtgcaaaatgtgcacttgtcaaggttaccaaataagcgcgcttcatgtaaagcattgaaaacaacacgtagatgatcaagatgatctactagacatttgctatagatcaagatgtcgtcgaagtagacgaccacaaatcttccaatgaaagcacgtaaaacctcattcattaatctcatgaaagtactaggtgcattagtgagaccaaaaggcatgactaaccactcatacaaaccaaacttggttttaaatgccgttttccattcatcccctagcttcatgcaaatttggtgatatccactacgtaagtcaattttagagaaaatcatcgagccactaagttcatccagcatatcatctaacctagggataggatgacgatatctgatggtaatgttattaattgctcgacaatctacacacatgcgccatgagccatctttctttgggactaataaaacagggacagagcaaggactaagggactcacgcacataacctttatcgagtaattcttgtacttgtcgctgaatctccttggtttcttccgggttcatcctgtatggcgctcagtttggcaaggaagcccctgggatgaggtcaatctgatgctcaattcctcttatcggtggcaggccaggtggcacatcgtttggaaatacatcagcatattcctgcaaaagattagtgacagtagaaggcaaagtagatggtatgttgtgaagtgagaacaaagcatccttgcaaataaatacatagcagattgaagcaacatcatttaattcaagcaaatcagatttggaagcaagaaaacaagcacttttcagttgtatttctgtcttcctcacttgagcagatttagaattgtcactcttatgttgtaccaactcctttgcagcacctagatttttattatgaacagatttatttttctctttgcaagctctagcaacttcatccttcaaaatagcatcgggggacatggggtgcaatacaagcttcttctcattatgcataaaagagtagtgattggttttaccatgatgcacggtgtccttatcaaattgccatggtctaccaaataacatagagcaagcttgcataggtaccacatcacaatcaatataatcatggtatgaaccaattgtaaattccacacggaccatacgtgttaccttaagcttaccactgtcgttgaaccattggatgtagtaggggtgtggatgtggaagctgatgaggacatcaacaccaacacgagcacatctacaccagcagcaccttctccagcccaggcaccatcttccccagtccaggcgccaccccttccacctgggccagtgactcgggcccgtgcaagagaattgaactacatcatgttgttaaagaacgaaggcccggaagaatagacgaccagcccaattgcggcccataatggacgacctagggttggccgcccctaggggctgcgccccctctctatttatacaggagctgcgcctcctttattttccgagttttgttttacgttagctttagctactctcgaacacgcgcaaatctgcgttgtcttcgtgtattcagaactccaccctctagtaagagattagatttctcgcatctttttcttgttcgttcttcgattgcgcacaggacacgatcttcgtgatcaggtcgatctcgcattagcagggtcggcaaccacagggagttggttgaaagaaatgcattcgcggagcgggattgctcatcgtatccccacccccaggttcatcttcagggggtggggtattgtcattactttgcgagagaccacccccatcatgatgctgtggacgtaatttaccggattggggtaagttcggtgggaaagcccctcgatataattaaggtggcggcggactcctgtttgtatgggatccgacgcgccgttttttaaagggggaaaaatgacggccggaaaaattcggacgtaaccagaacggaaacctcttgttttgggagcttccagtgtgggggggtgcgggcgtgttcgcaagacgaaaattcggggaaattttggacgaggggtggcactcacggcgagcgtgtctaagcctaatctgttccttgtatatcaagaatgggggtggccctggctggcgtaacaaagagtgagcgggaaaaggcccggctaagcaac

SEQ ID NO: 397 - DNA, 684 bp, Zea mays
  VARIATION (1)..(1): /replace="c" or "g" or "t"
  misc_feature (1): /note="Nucleotide given in the sequence has no preference with respect to those in the annotation for said position"
  VARIATION (9)..(78): /replace="c" or "g" or "t"
  misc_feature (9)..(78): /note="Nucleotides given in the sequence have no preference with respect to those in the annotations for said positions"
  VARIATION (178)..(178): /replace="c" or "g" or "t"
  misc_feature (178): /note="Nucleotide given in the sequence has no preference with respect to those in the annotation for said position"
  VARIATION (394)..(394): /replace="c" or "g" or "t"
  misc_feature (394): /note="Nucleotide given in the sequence has no preference with respect to those in the annotation for said position"
  VARIATION (563)..(563): /replace="c" or "g" or "t"
  misc_feature (563): /note="Nucleotide given in the sequence has no preference with respect to those in the annotation for said position"
  source: /note="Zea mays BAC clone full insert sequence contig bacm.pk024.f21.fis1"
agacccgtaaaaaaaaaaaaaaaaaaaaaaaaaaaaaaaaaaaaaaaaaaaaaaaaaaaaaaaaaaaaaaaaaaaaaataaaatatgcaacagtttgccttcttgtaacaaaacaccacccaatccaattccactagcatcacattgaagctcaaaagtcttatctttcagcacgttagaaagagtgctcttgtactttgccccaacaaaaatgcactcccttcttcgtaagctcattcaaaggtgcagcaatggtgttaaagtccttcacaaaacggcgatagaagccggcaagtcctaggaaactccgcacctgtgtgatagtctttggcataggccatccatgtatcgcttctaccttggcttgatcaaccctcattccctgtggagtcaacacataaccaagaaacgaaactcgatcggtgcaaaatgtgcacttctcaaggttacaaataaacgtgcatctcgtaaagcattaaaacagcacgcatgtgatcaaacatgtcatccatagatttgctgtagatcaatatgtcatcaaagatactaccacaaattttccaattgaggcacacaaaactccgtcattaatctcaagaaaaggcaaggggcttactggacccaaaagcatgactaaccttctacaatcggaactagttttgaagccgtttccatccactccaa

SEQ ID NO: 398 - DNA, 790 bp, Zea mays
  VARIATION (1)..(1): /replace="c" or "g" or "t"
  misc_feature (1): /note="Nucleotide given in the sequence has no preference with respect to those in the annotation for said position"
  VARIATION (9)..(38): /replace="c" or "g" or "t"
  misc_feature (9)..(38): /note="Nucleotides given in the sequence have no preference with respect to those in the annotations for said positions"
  source: /note="Zea mays BAC clone full insert sequence contig bacm.pk024.f21.fis2"
agacccgtaaaaaaaaaaaaaaaaaaaaaaaaaaaaaattacaaaaaacaggcgaggtcgacggtatcgattttccctgatttgcgaaaaacgaagaaatggttccggtggcaaaaactcgtgctttatgcaccccgacaaccgttttcggaatgggtgacgtgcagcaacgatatagcgcgaaaccaccccaaacatgagttttggacctaaagtagaggattgggaatgttcgttgcgaaaaacgaagaattggttccggtggcaaaaactcgtgctttgtatgcaccccgacacccgttttgggaatgggtgacgtacggcaacgaaattgcgcgaaaccactccaaacatgagttgtggacctaaagtagtggattgggcatgctcgttgcaaaaatcgaagaaatggttccggtggcgaaaactcgtgctttgtatgcaccccgacacctgttttcggaatgggtgacgtgcggcaacgaaattgcgcgaaagcaccccaaacataagttttggatctaaactagtggattgggcatgttcgttgcgaaaaacgaagaaatggttccggtggaaaaaactcgtgctttgtatccgacacccgttttcggaatgggtgacgtgcggcaatgatatagcgcgaaacaaccccaaacatgagttttggacctaaagtaaaagattggtcatgttcgttgcgaaaaagaagaattgggttccggtgcaaaaactcgtgctttgtatgcacaccgacacccgtttggaaatgggtgacgtacgacaacaa

SEQ ID NO: 399 - DNA, 789 bp, Zea mays
  VARIATION (11)..(76): /replace="c" or "g" or "t"
  misc_feature (11)..(76): /note="Nucleotides given in the sequence have no preference with respect to those in the annotations for said positions"
  VARIATION (709)..(709): /replace="c" or "g" or "t"
  misc_feature (709): /note="Nucleotide given in the sequence has no preference with respect to those in the annotation for said position"
  VARIATION (789)..(789): /replace="c" or "g" or "t"
  misc_feature (789): /note="Nucleotide given in the sequence has no preference with respect to those in the annotation for said position"
  source: /note="Zea mays BAC clone full insert sequence contig bacm.pk024.f21.fis3"
gacccgtataaaaaaaaaaaaaaaaaaaaaaaaaaaaaaaaaaaaaaaaaaaaaaaaaaaaaaaaaaaaaaaaaaattgtgggtaggctgcactcaagtcaaggattagcacgatcaaacaataatgcaaagttgaattatagtgcaaaacacgaaactatattgctggccacaggtgcaaaggatggatggaactagcagaatggcagtaccgtaaatattgtactagtgatgccaaaaaggcactagtagaaatcacaggtgattttgtttttcttttttgtatgatttttttgatatttttctcagcacaagaagcaacaagataggagctacacgaagtttcacctaaaatagatatcagatgtggtctatagaaaattaggaagttctataaaaagcgtgcgagaactttgacgaatttttttctttattttcctgaatttttttgacaattttgtcgaaaccaaacagaatggtgtcaacaagctcctgtaaaaatttcagattttttggacacccgagcgaaaagttatgcccggtttaaggaaggtacctcaaattatgttttcaaacgaccgggatgaaacaaccgtatcctttctccttcgttgttttttgtttctgtttttttttgacgtaaccgaaggagaaaaacaaggaaacgatgttgactcggtttgttttttttttctgttttttttttcgaaaccgaaggagaaaaacaaggaaacggcccgttgactcgtttgttttttcggttttttttttgacgtaaccgaagagaaa

SEQ ID NO: 400 - DNA, 798 bp, Zea mays
  VARIATION (1)..(1): /replace="c" or "g" or "t"
  misc_feature (1): /note="Nucleotide given in the sequence has no preference with respect to those in the annotation for said position"
  VARIATION (9)..(68): /replace="c" or "g" or "t"
  misc_feature (9)..(68): /note="Nucleotides given in the sequence have no preference with respect to those in the annotations for said positions"
  VARIATION (789)..(789): /replace="c" or "g" or "t"
  misc_feature (789): /note="Nucleotide given in the sequence has no preference with respect to those in the annotation for said position"
  VARIATION (797)..(797): /replace="c" or "g" or "t"
  misc_feature (797): /note="Nucleotide given in the sequence has no preference with respect to those in the annotation for said position"
  source: /note="Zea mays BAC clone full insert sequence contig bacm.pk024.f21.fis4"
agacccgtaaaaaaaaaaaaaaaaaaaaaaaaaaaaaaaaaaaaaaaaaaaaaaaaaaaaaaaaaaaatacctgatgtgcatctcgtaaagcattaaaaacagcacgcatgtgatcaacatgttcatccatagatttgctgtagatcaatatgtcatcaaagtatactaccacaaattgtccaatgaaggcacgcaaaacctcgttcattaatctcatgaaagtgctaggtgcattagttaacccaaaaggcatgactaaccactcatacaatccgaacttagttttgaaagcagttttccattcatctcccaatttcatacgaatctggtggtacccactacgcaaatcaactttagaaaagacgatggcaccactcaattcatcaagcatatcatctaaacgtggaatagggtgtcgataccgtatcatgatattattaatagccctacaatcaacacacatacgccatgttccgtcttttttaggcactaaaataaccggaacagcacacggactaagagactcacgcacgtaacctttgtcgagtagttcttgcacttgtcgctgaatttcttttgtttcctctggatttgtcctatatggcgcacgattcggcaaagatgcaccaggaataagatcaatttggtgctcaatccctcgtataggtggcagcgcctctggtatctcacttggaatacatcagaatactcctgcaaaatgttagtaataacaggagggcaagaatgctgcatatctttgattttgaatcaagcatccttgcataccaaggcgtaag

SEQ ID NO: 401 - DNA, 541 bp, Zea mays
  VARIATION (5)..(106): /replace="c" or "g" or "t"
  misc_feature (5)..(106): /note="Nucleotides given in the sequence have no preference with respect to those in the annotations for said positions"
  source: /note="Zea mays BAC clone full insert sequence contig bacm.pk024.f21.fis5"
aacgaaaaaaaaaaaaaaaaaaaaaaaaaaaaaaaaaaaaaaaaaaaaaaaaaaaaaaaaaaaaaaaaaaaaaaaaaaaaaaaaaaaaaaaaaaaaaaaaaaaaaagcaaagaaaacggaggacatacttgctggtcatttcttttggcccaagatgagaagagatgtggtgagattggttgctcgttgcacgacatgtcaaaaggcgaagtcacggttaaatccacacggtttgtatttgcctctacccgttcctagtgctccttgggaagatatttctattgattttgtgctggggattgcctaggactagggaagggacgtgaataagtgtggttttggggttgttgaaaagattttcctaaggatgggcaacatttaaatacccatggccaataaaaaactgaacgaaatgccaaccccataattgccgggaatttgggtcccttttccggggaaaaaattggtccggctttgcccattgggaaagggcccccaaaaaacaaaatccgtttttcccggaaacccggggaaaggccca

SEQ ID NO: 402 - DNA, 776 bp, Zea mays
  VARIATION (1)..(1): /replace="c" or "g" or "t"
  misc_feature (1): /note="Nucleotide given in the sequence has no preference with respect to those in the annotation for said position"
  VARIATION (48)..(77): /replace="c" or "g" or "t"
  misc_feature (48)..(77): /note="Nucleotides given in the sequence have no preference with respect to those in the annotations for said positions"
  source: /note="Zea mays BAC clone full insert sequence contig bacm.pk024.f21.fis6"
agaccgcgtatagactcctatagggcgaatgggtacaacaccagcggaaaaaaaaaaaaaaaaaaaaaaaaaaaaaagtttggggtggtttcgcgctatatcgttgctgcacatcacccattccgaaaacggttgtcggggtgcatacaaagcacgagtttttgccaccggaaccatttttcgcttttcgcaacgaacatgcccaatccactactttaggtccaaaactcatgtttggggtggtttcgcgcaatttcgttgccgcacgtcacccattccgaaaacgggtgttggggtgcatacaaagcacgagttttcaccaccggaaccaattcttcatttttcataacaaacattcccaatcctctactttaggtccaaaactcatgtttggggtggtttcgcgctatatcgttgccgcacgtcacccattccgaaaacgggtgtcggggtgcatacaaagcacgagtttttgccaccggaaccatttttcgctttttgcaacgaacatgcccaaaccactaacttaaggcccaaaatcaagtctggggtgggttcctgcaatttccttgccgcacgtcacccatttcgaaaaccggtgttggggtgcatacaaagcacgagttttcgccaccggaaccatttcttcgtttttttgcaacgaaatgcccaatccactactttaggtccaaaactcttgttttggggtgttcccccgctaattcgttggcgcacgtcacccatttccaaaaggggtttcggggggcatacaaaac

SEQ ID NO: 403 - DNA, 684 bp, Zea mays
  VARIATION (1)..(1): /replace="c" or "g" or "t"
  misc_feature (1): /note="Nucleotide given in the sequence has no preference with respect to those in the annotation for said position"
  VARIATION (13)..(36): /replace="c" or "g" or "t"
  misc_feature (13)..(36): /note="Nucleotides given in the sequence have no preference with respect to those in the annotations for said positions"
  VARIATION (48)..(77): /replace="c" or "g" or "t"
  misc_feature (48)..(77): /note="Nucleotides given in the sequence have no preference with respect to those in the annotations for said positions"
  source: /note="Zea mays BAC clone full insert sequence contig bacm.pk024.f21.fis7"
agacggcgtataaaaaaaaaaaaaaaaaaaaaaaaataccaacagggaaaaaaaaaaaaaaaaaaaaaaaaaaaaaactactttaggtccaaaactcatgtttggggtggtttcgcacaatttcgttgccgcacgtcacccattccgaaaacgggtgtcgggtgcatacaaagcatgagttttcgccaccagaaccatttcttcgttttccgcaacgaacatgcccaatccactactttaggtccaaaactcatgtttggggtggtttcgcgcaatttcgttgtcgtacgtctcccattcccaaaacgggtgtcggggtgcatacaaagcacgagtttttgccaccggaaccaattcttcgtttttcgcaacgaacatgcccaatcctctactttaggtccaaaactcatgtttggcgtggtttcgcacaatttcgttgtcgtacgtcacccattctcaaaacgggtgtcggggtgcatacaaagcaagagttttttccaccggaaacaattcttcgtttttcgcaacgaacacgctcaatcctctactttaggtccaaaactcatgttttgggttggtttcgcgctacatcgttgccgcacgtcacccattccgaaaacgggtgtcggggtgcatacaaagcacgagtttttgctatcgaaaaaattttcctcgttttttcgc

SEQ ID NO: 404 - DNA, 697 bp, Zea mays
  VARIATION (5)..(106): /replace="c" or "g" or "t"
  misc_feature (5)..(106): /note="Nucleotides given in the sequence have no preference with respect to those in the annotations for said positions"
  VARIATION (643)..(643): /replace="c" or "g" or "t"
  misc_feature (643): /note="Nucleotide given in the sequence has no preference with respect to those in the annotation for said position"
  source: /note="Zea mays BAC clone full insert sequence contig bacm.pk024.f21.fis8"
acgcaaaaaaaaaaaaaaaaaaaaaaaaaaaaaaaaaaaaaaaaaaaaaaaaaaaaaaaaaaaaaaaaaaaaaaaaaaaaaaaaaaaaaaaaaaaaaaaaaaaaaacttttgcaggaatatgctgatgtatttccaaacgaagtgccacctggcctgccaccgataagaggaattgagcatcagattgacctcatcccaggggcttccttgccaaaccgagcgccatacaggacaaacccggaagaaaccaaggagattcagcgacaagtacaagaattactcgataaaggttatgtgcgtgagtcccttagtccttgctctgtccctgttttattaatcccaaagaaagatggctcatggcgcatgtgtgtagattgtcgagcaattaataacattaccatcagatatcgtcatcctatccctaggttagatgatatgctggatgaacttagtggctcaatgattttctctagaattgacttacgtagtggatatcaccaaattcgcatgaagctaggggatgaatggaaaacggcgtttaaaaccaagtttggtttgtatgagtggttagtcatgccttttggtctcactaatgcacctagtactttcatgagattaatgaatgaggttttacgtgctttaaatggaagatttgtggtcgtctacttcgatgacatcttgatctatagcaaatgt

SEQ ID NO: 405 - DNA, 777 bp, Zea mays
  VARIATION (1)..(1): /replace="c" or "g" or "t"
  misc_feature (1): /note="Nucleotide given in the sequence has no preference with respect to those in the annotation for said position"
  VARIATION (13)..(76): /replace="c" or "g" or "t"
  misc_feature (13)..(76): /note="Nucleotides given in the sequence have no preference with respect to those in the annotations for said positions"
  VARIATION (707)..(707): /replace="c" or "g" or "t"
  misc_feature (707): /note="Nucleotide given in the sequence has no preference with respect to those in the annotation for said position"
  VARIATION (740)..(740): /replace="c" or "g" or "t"
  misc_feature (740): /note="Nucleotide given in the sequence has no preference with respect to those in the annotation for said position"
  VARIATION (743)..(744): /replace="c" or "g" or "t"
  misc_feature (743)..(744): /note="Nucleotides given in the sequence have no preference with respect to those in the annotations for said positions"
  VARIATION (771)..(771): /replace="c" or "g" or "t"
  misc_feature (771): /note="Nucleotide given in the sequence has no preference with respect to those in the annotation for said position"
  VARIATION (774)..(774): /replace="c" or "g" or "t"
  misc_feature (774): /note="Nucleotide given in the sequence has no preference with respect to those in the annotation for said position"
  source: /note="Zea mays BAC clone full insert sequence contig bacm.pk024.f21.fis9"
agaccgcgtataaaaaaaaaaaaaaaaaaaaaaaaaaaaaaaaaaaaaaaaaaaaaaaaaaaaaaaaaaaaaaaaagtgcgacaaggctcttgtcaatatgagcaactgtcatttccacatttgcaagtttggtgtttgtgtcgatctgtgtggcctccaattgccccatcttttcattcgtcacctgcatgtcattatcaagaccttccgtgtgcgtcttcaccagccttacaaagtgttatatgatacctttggtgcgaggagagtgtggcatattacgagaagcatcatcaacctccaatcctgccatggttagacgaacagaggcaacaagaaaaaaaaacgtgaaggaatgaaaactctacaactattaggatgtagctactgcaaggcgctcactctcaacctgccacacaagctcttaccaattcttaccttgcacaacaggaggggtcagcaaccaacaagtctacaaccgtggaataagtgtatcggtgccgcagcaacacgacctgtcaaactgtagtcgaaatatgtagagttgtaggtgggctgaagcaaggaatacactagtaccacgttagttacaaaagcaagctgaataatcgttcaacggtggtactgtgctggtcctaggctaaacaggctagagacgtgagcctaggcacaaaggtagtcactgaaaaagaacactagcacagcacaaagagaaacaacagatttagagattcagcccccatcaatcttctttccttttttttcctttcaaatcattt

SEQ ID NO: 406 - DNA, 777 bp, Zea mays
  VARIATION (1)..(1): /replace="c" or "g" or "t"
  misc_feature (1): /note="Nucleotide given in the sequence has no preference with respect to those in the annotation for said position"
  VARIATION (12)..(77): /replace="c" or "g" or "t"
  misc_feature (12)..(77): /note="Nucleotides given in the sequence have no preference with respect to those in the annotations for said positions"
  source: /note="Zea mays BAC clone full insert sequence contig bacm.pk024.f21.fis10"
agagcgctataaaaaaaaaaaaaaaaaaaaaaaaaaaaaaaaaaaaaaaaaaaaaaaaaaaaaaaaaaaaaaaaaaatggcgtggtttcgcgtaatttcgttgtcgtacgtcacacattcccaaaacgggtgtcggggtgcatacaaagcacgagtttttgccaccggaaccaattcttcgtttttcacaacgaacattcccaatcctctactttaggtccaaaactcatgtttggggtggtttcgcgctatatcgttgccgcccgtcacccattccgaaaacgggtgtcagggtgcatacaatgcacgagtttttgccaccggaaccatttcttcgtttttcgcaacgaacatgcccaatccactactttaggtccaaaactcatatttggggtggtttcgcgcaatttcgtagccgcacgtcacccattccgaaaatgggtgtcgggtgcatacaaagtatgagttttcgccgccggaaccaattcttcgtttttcgctacgaacatgcccagtccactactttaggtaaaaactcatattttggggtggtttcgcgcaatttcgttgcgagacgtcacacattccaaaaacgggtgtcggggtgcatacaaagcacgactttttgccaccgaaccatttcttcgtttttcgcacgaacattctcatcctctactttaggtcaaaactcatgtttggggtgggttcgcgctatatcgttgccgcccgtcacccattccgaaaaacggtgtcaagggtgctacaaaggcacaagtt

SEQ ID NO: 407 - DNA, 1050 bp, Zea mays
  source: /note="Zea mays BAC clone full insert sequence contig bacm.pk024.f21.fis11"
gtcccttcgaatgtgcccaaatcctttgcattggaggcattggatgtcctttgttcttcccgtggaagcaatagaagatatttggctacagcttgggaggatcctttccctgtctcaatagcacgagaaggtgctgatttcgatggtgttgtggatgatctattggaagcatctccctgaaacacatggttagagctagcagcactagtgcggggctgccaagatgtattgcgacctgcataagtgttagttctcaagcatcgtccctggacttctctttcagccttacaagcaagatgaaataagcgagtaacattagtgtattccttgtaagctaatatatcctgaatttctcttgtcaaaccacccatgaacctagccattgcagcttcttcattttctacgagaccacacctcaacatgcctatttgtaattgttgataatactcttcaacagatttgttgccttgtctaagctgttgtaatttatgtaataaatcacgagcatgataggaaggaacaaaacgactacgcatgattctttttaaagcattccaagtttgtggtatggtagctagatgtgtagtttggtactcatgccaccaaatagaagcaaaatcagtgaattcactcgtagcagctctaacctttttatcatcagaaaaatcatagcatgcaaatttttgatctaccgacaattcccatgttagatatgcatcaggatcatattttccatcaaacgatggtatggagaatttaattcttcctagagaatcatcattttcatgtacctcacgtcgtggaggtcgaccacccaagccatggcgatcacgtcgttggtgtcgtcggtgcctaatagatcggtcatcacgctcggtgtctgctgaatactccgtagcatcatctcttgcggtaccagcaatggaaccatagccatcatcatcaccttgttgcctactttcacgcccaacttggtccatcctatctaagcgctcaataattgctgcaagagaggtgttagtagcagcaactgtttgttccaaagtggtc

SEQ ID NO: 408 - DNA, 668 bp, Zea mays
  source: /note="Zea mays BAC clone full insert sequence contig bacm.pk024.f21.fis12"
gacagggtactaaaagtgtagaagaatattatcaggaattacaaatgggtatgctgcgttgtaacatagaggagggtgaggaatctgctatggctagatttttgggcgggttaaatagggaaattcaggacatccttgcttataaagattatgctaatgtaacccgattgtttcatcttgcttgcaaagctgaaagggaagtgcagggacgacgtgctagtgcaaggtctaatgtttctgcaggaaaatctacaccatggcaacagcgcacgactacgtccatgaccggtcgtacactagcaccaactccctcgccaagtcgaccagcacccccgccttcctccggcgacaaaccacgtgcatcttccacaaattcagcaaccaaatctgcccagaaaccagcaggtagtgcctcttcagtagcctccacgggtagaacaagagatgttctgtgttatcgatgcaagggctatggacacgtgcagcgtgattgtcctaatcagcgtgttttggtggtaaaagacgatggtggggtatcctctgctagtgatttggatgaagctacacttgctttgcttgcggctgatgatgcaggcactaaggaaacacccgaagaacagattggtgcagatgatgcaagcattatgagagctccttggtacgcgtgt

SEQ ID NO: 409 - DNA, 711 bp, Zea mays
  VARIATION (688)..(688): /replace="c" or "g" or "t"
  misc_feature (688): /note="Nucleotide given in the sequence has no preference with respect to those in the annotation for said position"
  source: /note="Zea mays BAC clone full insert sequence contig bacm.pk024.f21.fis13"
catgaccggccgtacactagcaccaactccctcgccaagtcgaccagcacccccgccttcctccagcgacaaaccacgtgcatcttccacaaattcagcaaccaaatctgcccagaaacccgcaggtagtgcctcttcagtagcttccacaggtagaacaagagatgttctgtgttatcgatgcaagggctatggacacgtgcagcgtgattgtcctaatcagcgtgttttggtggtaaaagacgatggtgggtattcctctgctagtgatttggatgaagctacacttgctttgcttgcggctgatgatgtaggcactaaggaaccacccgaagaacagattggtgcagatgatgcagagcattatgagagcctcattgtacagcgtgtgcttagtgcacaaatggagaaggcagagcagaatcagcgacatacgttgtttcaaacaaagtgtgtcattaaggagcgttcatgtcgtttgatcattgatggaggtagctgcaacaacttggctagcagcgacatggtggagaagcttgcacttacgaccaaaccgcacccgcatccatatcacattcaatggctcaacaatagtggtaaggtcaaggtaaccaagctggtacgaattaattttgctattgggtcatatcgtgatgtttgtgactgtgatgttgtgcctatggatgcattgtatattctgctaggtagacc

SEQ ID NO: 410 - DNA, 602 bp, Zea mays
  source: /note="Zea mays BAC clone full insert sequence contig bacm.pk024.f21.fis14"
gcgcattctcaggaaattcatggcatgcaaacttttgatcaaccgcaatctcccaagtaatgtaagcatcagggtcatatttaccatcaaaaggaggtattttaaatttaaccttactaaaagcatcatcattaccatgtacctcacgtcggtgaaaaccacccatacctctacggttagtacgtagtcgccggcgattaggtgcttcttggtcatcttgttcagtatcagcaacatagtcatcccagttaccttcggcgccctcatcacgcccaccattgatattagcatgcatctcatcaaaccgcctcaagagtgcgacaaggctcttgtcaatatgagcaactgtcatttccacatttgcaagtttggtgttcgtgtcgatctgtgtggcctccaattgccccatcttttcattcgtcacctgcatgtcattatcaagaccttccgtgtgcgtcttcactagccttacaaagtgttgtatgatacccttggtgcgaggagagtgtggcatattacgagaagcatcatcaacctccaatcctgccatggttagacgaaatcaagcggaaaataccgtcgacctcgacgccggtgttgat

SEQ ID NO: 411 - DNA, 1373 bp, Zea mays
  source: /note="Zea mays BAC clone full insert sequence contig bacm.pk024.f21.fis15"
caaaacaccaaaaggagacccaacgacaaaaacaggggtgtactgctcacaaggcgctcacactagtgctgttatcaagttcttatccgttcttaccaagccacagtggtgaactgcaatcaacaggtggaaccggtgaaagattggatgagcgattgcgtggagaaacagaaacctgctcgtcgtagaaatatgtggagttgtgggaaggctgcactcaagtcaaggattagcacgatcaaacaataatgcaaagttgaattatagtgcaaaacacgaaactatattgctggccacaggtgcaaaggatggatggaactagcagaatggcagtaccgtaaatattgtactagtgatgccaaaaaggcactagtagaaatcacaggtgatgttgtttttctttttttgtatgatttttttgatatttttctcagcacaagaagcaacaagataggagctacacgaagtttcacctaaaacagatatcagatgtggtcgatagaaaatcaggaagttctctgaaaagcgtgcgagaactttgacggatttttttctttattttcctgaatttttttgacaattttgtcgaaccccaaacagaccgtaggtgagtttggccggcctcagaaagatgtcaactagctcctgtaaaaatttcaaattttttggacacccgagcgaaaagttatgcccggtttacggaaggttcctcaagttatgttgtaaaaacgaccgggatgaaacaaacgtatcctttctccttcgttttctttttttgtatctgtttttttatgtacccgaaggagaaaaacaaggaaacggccgttgactcggtttgtttttctgtttttttttgacgtaaccgaaggagaaaaacaaggaaacgatgttgacttagtttgtggcgtgatcaaaggggagatggtggcggtgctagggtttgaatggtggaagaacacaatgcaaccagcaacaaataacgcgaaagcacacaaattcaacaatgcagattattgaaagaaagtgcgaggctcaaaaaggtgttgggataaggtctaacctaaatttttatgtggttttgtggactgtaggaaaaaaaacactcgataaactcaccgatcaacctggaaatctgataccaattgatgtagctgaggtgcccgatctttcggcgagtagagataattccgatttggcggaagatgacccttgcgatccgactacgacgagcaagcccgaggcgccaatgcaatcgctgaaccaactccctgtggttaccgaccttgctgatgcgagatcggcctgatcacgaagatcgtttcctgtgtgcaatcgaagaacgaacaagaacaagatgcgagcaacctaatcta

SEQ ID NO: 412 - DNA, 1039 bp, Zea mays
  VARIATION (973)..(973): /replace="c" or "g" or "t"
  misc_feature (973): /note="Nucleotide given in the sequence has no preference with respect to those in the annotation for said position"
  source: /note="Zea mays BAC clone full insert sequence contig bacm.pk024.f21.fis16"
cgtggtgtggatccgaatcatagtcatatctgttctgaggccgtcgtaatcattgttttcttaccgagacatttcctgccttttctgcccatggtgctgcgtcaccctattttggcccaatgggtcgtgtatcaagttaggtctattagggacgcatcctagggttgcagcacgaccccaatacccttgtggtcgtcctcccatgtttataaaccccctagccgccaccaagaacagcgggttttgtttagatcaagtttagctctcgctacttgcttgcaagcgcgcgtgctagttcagccgcccgtcttcttgtcttcggaaccccaccatattgtagtttgatctttaaacctacatttagatctggtaattcagtacttgttctacttgttcttgctagttcttcgattgcttgcaggacgagtgccctagtggccagggtgtcacgctccacaagatcgtgacagccataggaggtggtgtatcggttgctaaggcgcagcgtctttggaaggctgtagtcgggccgtgaacgtcgtctcctcccccaatcgagttattccacaccctctcatcgaaagatcgggcaatcacccaacgggtgcacatcagttggtaatcagagcaaggtttatcggtgagagatttacttttcttcgctgttttcttatctcctatagtccagaaaaagccaaaaaatagtagattagttttaccgcaatcctataaaccattgagcatttactagtactacttagttagggcttgttgagtttttggttgcatcggttgtgtcgagttgctggtcttagtttattcctttagagttttgagttctaccacgttttggtcaccacgaaatccaccatcaccaaaaacatctctggttcgtttttgccaccacggatacatatcatatccgatttggaagttaaatacaatctggaaagcttatcttatcttctttccaacggatctgaccttatctcaaaattcgttctgagcgctccgcaatcatcgtagagattctggactt

SEQ ID NO: 413 - DNA, 800 bp, Zea mays
  VARIATION (776)..(776): /replace="c" or "g" or "t"
  misc_feature (776): /note="Nucleotide given in the sequence has no preference with respect to those in the annotation for said position"
  source: /note="Zea mays BAC clone full insert sequence contig bacm.pk024.f21.fis17"
gccctacttgggagaggaagttgagcttgagtcgaggacgactcaaatgcaagaaggggagaatgatgaagacatccacactactgatacatctatgccaatacaagtaccaatttctggtcccattactcgcgctcgtgcttgtcaactccaccatcaggtgattacactcttgaatgcatgtccatcatatttagaccatggagacccgtgcactcttgttttgcttaggaaccagggagaagaccgaaagggaaaaagatttgaacatgctggattcggactgcagaagaacaccaacttgtgacggtcaccacggtcacatgcaggctcggattggaatgttcaagcacaacatggaaagcctatcaagtcgactttcatatggatccggaattatagtcatatcttttctgaggccgccgtaatcattgtttccttactgagacatttcctgccttttctacaaatggtgctgcgtgaccctattttggcccaatgggtcgtgtatcaagttgggtccattagggacgcatcctagggttgcagcacgaccccaatacccttgtggtcgtcctcccatgtttataaaccccctagccgccaccaagaacagcgggttttgtttatatcaagtttagctctcgctacttgcttgtaagcgcgcgtgctggttcagcccgcccgtcttcttgtcttcggaactgatgaagacttccacactactgatgcatctataccaatacaagtaccaatttctggtcccattaactcgaggctcgtgctcgtcaactcaacaa

SEQ ID NO: 414 - DNA, 727 bp, Zea mays
  source: /note="Zea mays BAC clone full insert sequence contig bacm.pk024.f21.fis18"
tgaatgtgatatggatgcgggtgcggtttggtcgtaagtgcaagcttctccaccatgtcgctgctagccaagttgttgcagctacctccatcaatgatcaaacgacatgaacgctccttaatgacacactttgtttgaaacaacgtatgtcgctaattctgctctgccttctccatttgtgcactaagcacacgctgtacaatgaggctctcataatgctctgcatcatctgcaccaatctgttcttcgggtggttccttagtgcctgcatcatcagccgcaagcaaagcaagtgtagcttcatccaaatcactagcagaggaatacccaccatcgtcttttaccaccaaaacatgctgattaggacaatcacgctgcacgtgtccatagcccttgcatcgataacacaaaacatctattgttctacccgtggaggctactgaagaggcactacctgctggtttctgggcagatttggttgctgaatttgtggaagatgcacgtggtttgtcgtcggaggaaggcgggggtgctggtcgacttggcgagggagttggtgctggtgtacggccggtcatggacgtagtcgtgcgctgttgccatggtgtagattttcctgcagaaacattagaccttgcactagcacgtcgtccctgcacttccctttcagctttgcaagcaagatgaaacaatcgggttacattagcataatctttataagcaagga

SEQ ID NO: 415 - DNA, 1194 bp, Zea mays
  source: /note="Zea mays BAC clone full insert sequence contig bacm.pk024.f21.fis19"
tggttccggtggcaaaaactcgtgctttgtatgcaccctgacacacgttttggaaatgggtgacgtacgacaacgaaattgcgcgaaaccaccccacacatgagttttggacataaagtactggattgggcatgttcgttgcgaataacaaagaaatggttccggtggcgaaaactcatgctttgtatgcacccgacacccgttttcggaatgggtgacgtgctgcaatgatatagcgcgaaaccaccccaaacatgagttttggacctaaagtagaggattgggcatgttcgttgcgaaaaaagaagaattggttccggtagcaaaaactcgtgctttgtatgcaccccgacacccgttttggaaatgtgtgacgtgcggcaacgaaattgcgcggaaccaccccaaacatgagttttggacctaaagtagtggattgggcatgttcgttgcaaaaaacgaagaaatggttcctgggtggcgaaaactcgtgcttttgttgccccccgacacccgttttcggaatgggtgacgtgcggcaacgaaattgcgcgaaaccaccccaaacatgagttttggacctaaagtagtggattgggcatgctcgttgcaaaaaacgaagaaatggttccggtggcaaaaactcgtgctttgtatgcacctcgacacccgttttcggaatgggtgacgtgcggcaacgaaattgcgcaaaaccaccccaaacataagttttggacctaaagtagtggattgggcatgttcgttgcgaaaaacgaagaaatggttccggtggcaaaaactcgtgctttgtatgcaccccgacacccgttttcgaaatgggtgacgtgcgtcaccgaaatagcgcgaaacaaccccaaacatgagttttggacctaaagtagaggattgggcatgttcgttgcgaaaaacgaagaattggttccggtggcaaaaactcgtgcttggtatgcacctcgacacccgtttcggaaatgggtaacgtccggcacgaaaattgggcgaaaccaccccacacttgagtttttggacctaaagtagtggatttggccatggtcctttccaaaaaacaaagaaatggttcgggtggcgaacacccgggctttgtatgcacccgacactgcttttcggaattgggtaaggtgcgggaaccaaatttcggggaacaacccaaaa

SEQ ID NO: 416 - DNA, 844 bp, Zea mays
  source: /note="Zea mays BAC clone full insert sequence contig bacm.pk024.f21.fis20"
tgctgagaaaaatatcaaaaaatcatacaaaaaaagaaaaacaaaatcaccctgtgatttctactagtgcctttttggcatcactagtacaatatttacgttactgccattctgctagttccatccatcctttgcacctgtggccagcaatatagtttcgttttttgcactataattcaactttgcattattgtttgatcgtgctaatccttgacttgagtgcagcctacccacaacttcacatatttctacgacgagcaggtttctgtttctccacgcaatcgctcatccaatctttcaccggttccacctgttgattgcagttcaccactgtggcttggtaagaacggataagaacttgataacagcactagtgtgagcgccttgtgagcagtacacccctgtttttgtcgttggtttttttctccttttggtgttttggtgtttgcactaactatggcaggagcacacgacatggtggatgcccagttgcaggaagtaaggggacaagttgatggacttgctgctgacattaggacgatgcatgaacggcttgattcaacgatcacttcgtcgaccgagcgtttcaaccaacttgaccttgctcaaacggcgactcgcaccacactcgacaccatcctggcacgccttgatgccttgaccacaaagatggagcaggaatacggcggtgacactgagcaggacgatggagatcgccgtggtcgtgcacgtcgtgtggttcgtcatccccctaatgacttattttctaagattaatttaaaattccatcttttaatggtaaatatgatcctgctgcatatcttgattgggaatttagagtaga

SEQ ID NO: 417 - DNA, 1594 bp, Zea mays
  VARIATION (1346)..(1346): /replace="c" or "g" or "t"
  misc_feature (1346): /note="Nucleotide given in the sequence has no preference with respect to those in the annotation for said position"
  VARIATION (1464)..(1465): /replace="c" or "g" or "t"
  misc_feature (1464)..(1465): /note="Nucleotides given in the sequence have no preference with respect to those in the annotations for said positions"
  VARIATION (1554)..(1554): /replace="c" or "g" or "t"
  misc_feature (1554): /note="Nucleotide given in the sequence has no preference with respect to those in the annotation for said position"
  source: /note="Zea mays BAC clone full insert sequence contig bacm.pk024.f21.fis21"
ctacggttagtacgtagtcgccggcgattaggtgcttcttggtcatcttgttcagtatcagcaacatagtcatcccagttaccttcggcgccctcatcacgcccaccattgatattagcatgcatctcatcaaaccgcctcaagagtgcgacaaggctcttgtcaatatgagcaactgtcatttccacatttgcaagtttggtgtttgtgtcgatctgtgtggcctccaattgccccatcttttcattcgtcacctgcatgtcattatcaagaccttccgtgtgcgtcttcaccagccttacaaagtgttgtatgatacccttggtgcgaggagagtgtggcatattacgagaagcatcatcaacctccaatcctgccatggttagacgaacagaggcaacaagaaaaaaaacgtgaaggaatgaaaactctacaactattaggatgtagctactgcaaggcgctcactctcaacctgccacacaagctcttaccaattcttaccttgcacaacaggaggggtcagcaaccaacaagtctgcaaccgtagaataagtgtatcggtgccgcagcaacacgacctgtcaaactgtagtcgaaatatgtagagttgtaggtgggctgaagcaaggaatacactagtaccacgttagttacaaaagcaagctgaataatcgttcaacggtggtactgtgctggtcctaggctaaaccaggctagagacgtgagcctaggcacaaaggtagtcactgaaaaagaacaactagcacagcacaaagagaaacaacagatttagagattcagcccccttcttcttcttttcccttttttttcttttctattcttttttttttcttcttctgtttttttttgcagggacctaaacccttttttttcactatgacaacccaaacaataaagatattgctaacagcccctttaaatcagatttaacaaatcttgttaatatagaaagtccagaaatctctacgatgattgcggagcgctcagaacgaattttgagataaggtcagatccgttggaaagaagataagataagctttccagattgtatttaaacttccaaatcggacatgagatgtatccgtggtggcaaaaacgaaccagagatgtttatggtgatggtggatctcgtggtgaccaaaacgtggtagaactcaaaactctaaaggaataaactaagaccagcaactcgacacaaccgatgcaaccaaaaactcaacaagccctagctaagtagtactagtaaatgctcaatggtttataggattgcggtaaaactaatctactatttttggctttttctggactataggagataagaaaacagcgaagaaaagtaaatctctcaccgataaaccttgctctgattaccaactgatgtgcacccgttgggtgattgcccgatctttcgatgagagggtgtggaataactcgattggaaggaggaacgacgttcacggcccgactacagccttccaaagacgctgcgccttagcaacgatacaccacctcctatggctgtcacgatcattgtggagcgtgacaccctgggcactagggcactcgtcct

SEQ ID NO: 418 - DNA, 1688 bp, Zea mays
  source: /note="Zea mays BAC Clone full insert sequence contig bacm.pk024.f21.fis22"
cttaaatcaccagcgcgaggtcgacggtatcgatttctttgatagcgccaggtgcagacgctgcttgataagggttacattcgtgagtctcttagcccttgctcggtccctgttttactcgttccaaagaaagatgggtcatggcgtatgtgcgtagattgtcgtgctattaataacatcacagttcgttatcgatatcctattccacgccttgatgatatgctagatgagcttagtggtgccgttattttctctaaggttgatttgcgtagcggttaccatcagattagaatgaaactcggtgatgaatggaaaacggcttttaaaacgaaatttggtttatatgaatggttggttatgccatttggattgactaatgctcccagcacctttatgcgtttaatgaacgaagttctacgggccttcataggtttatttgttgttgtttatttcgatgatatccttatttacagcaagtctatagaggagcatttagaacatttgcgtgctgtttttgatgctttgcgtgctgcccgcttgtttggtaacatggaaaagtgcacattttgcacgcaatgtgtctcgtttcttggttatgtggttactccgcagggcattgaggtggatagcagcaagattgctgccattcgggagtggcctacaccgacgacggtcacacaaattcggagctttcttggacttgccggtttctaccgcagatttgttcgtgattttagctccattgcagcgcctctacatgagcttacaaagaaagatgtgtcgtttgcttggagtgattcgcaggaggtagcgttcagcactttgaaagataagttaacccaagctcccctcttgcaattgcctgattttaataaagtttttgagcttgaatgcgatgctagcggtattgggctaggtgctgttttgttacaagaaggaaaaccagttgcttattttagtgaaaaattaagcggtgctagtctgaaatattctacttatgataaggagctttacgctttagtgcgcactttgcatacatggcaacactatctttggcatcgtgagttcataattcattctgatcatgaggctttaaaacatattcgtacccaaacaaatctgaaccgtcgtcatgctaaatgggtcgaattcattgagtcctttccttacattattaaacacaagaacgggaaggacaatgttattgctgatgctttgtctcgtcgctataccatgctgtcacaattagattttaaaatctttggtttggacactctgaaggatcaatatgttgacgatgctgattttaaagatgctttcggccattgtattaatgggataccatggggcaaatttcacatacaggatgggttcctgtttcgcgctaacaagctgtgtgttccagctagttcggttcgtcttttgttgttacaggaggcacatggaggcggtctcatggggcattttggcgtctacaaaacacatgaggtgttggctgcccacttcttttggcctcggatgcgcgctgatgttgagcgccttattgcacgctgcactacttgtcagaaagctaagtcacggttgaacaaccatggtttgtatatgcctttgcctgtcccttcttctccttggcttgatatctctatggactttgttttgggcttgcctagaactaagaaggggaggga

SEQ ID NO: 419 - DNA, 1628 bp, Zea mays
  source: /note="Zea mays BAC clone full insert sequence contig bacm.pk024.f21.fis23"
gcattaaaaacagcacgcatgtgatcaacatgttcatccatagatttgctgtagatcaatatgtcatcaaagtatactaccacaaattttccaatgaaggcacacaaaacctcgttcattaatctcatgaaagtgctaggtgcattactgaacccaaaaggcatgactaaccactcatacaatccgaacttagttttgaaagcagttttccattcatctcccaatttcatacgaatctggtggtacccactacgcaaatcaactttagaaaagacgatggcaccactcaattcatcaagcatatcatctaaacgtggaatagggtgtcaataccgtatcgtgatattattaatagccctacaatcaacacacatacgccatgttccatcttttttaggcactaaaataaccggaacagcacacggactaagagactcacgcacgtaacctttgtcgagtagttcttgaacttgtcgctgaatttcttttgtttcctccagatttgtcctatatggagcacgatttggcaaagatgctgatagagttggagtgcccgatctttcggtgagtggagataattccgatctggtggaagtagaccctcacgatccgactacgacgagcgaacccgaagcgccaatgcaatcgctgaaccaactcccaatggttactgaccttgctgctgcgagatcggcctgatcacgaagatcgtttcctgtgcgcaatcgaagaacgaacaagaaaaagatgcgagcaatctttgatgtgcacccgttgggtgattgcccgatctttcgatgagagggtgtggaataactcgattgggggaggagacgacgttcacggcccgactacagccttccaaagacgctgcgccttagcaaccgatacaccacctcctatggctgtcacgatcttgtggagcgtgacaccctggccactagggcactcgtcctgcaagcaatcgaagaactagcaagaacaagtagaacaagtactgaattaccagatctaaatgtaggtttaaagatcaaactacaatatggtggggttccgaagacaagaagacgggtggctgaactagcacgcgcgcttgcaagcaagtagcgagagctaaacttgatctaaacaaaacccgctgttcttggtggcggctagggggtttataaacatgggaggacgaccacaagggtattggggtcgtgctgcaaccctaggatgcgtccctaatagacctaacttgatacacgacccattgggccaaaatagggtgacgcagcaccatgggcagaaaaggcaggaaatgtctcggtaagaaaacaatgattacggcggcctcagaacagatatgactataattccggatccatatgaaagtagacttgataagctttccatgttgtgcttgaacattccaatccgagcccgcatctgaccgtggtgaccgtcacaagttggtgttcttctgcagtccgaatccagcatgttcaaatccttttccctttcggtcttctccctgattcctaagcaaaacaagagtgcacgggtctccatggtctaaatatgatggacatgaactcaagagtgtaatcacctgatggttgagttgacgagcacgagcgcgagta

SEQ ID NO: 420 - DNA, 811 bp, Zea mays
  source: /note="Zea mays BAC clone full insert sequence contig bacm.pk024.f21.fis24"
gggggctgatctctaatctgtgtttctcttgtgctgtgctagtgttcttttcagtgactactttgtcctaggctcacgtctctagcctggtttagcctaggaccagcacagtaccaccgttgaacgattattcagcttgcttttgtaactaacgtggtactagtgtattccttgcttcagcccacctacaactctacatatttcgactacagtttgacaggtcgtgttgctgcggcaccgatacacttattccacggttgcagacttgttggttgctgacccctcctgttgtgcaaggtaagaattggtaagagcttgtgtggcaggttgagagtgagcgccttgcagtagctacatcctaatagttgtagagtttttattccttcacgtttttttttcttgttgcctctgttcgtctaaccatggcaggattggaggttgatgatgcttctcgtaatatgccacactctcctcgcaccaagggtatcatacaacactttgtaaggctagtgaagacgcacacggaaggtcttgataatgacatgcaggtgacgaatgaaaagatggggcaattggaggccacacagatcgacacgaacaccaaacttgcaaatgtggaaatgacagttgctcatattgacaagagccttgtcgcactctttgaggcggtttgatgagatgcatgctaatatcaatggtgggcgtgatgagggcgccgaaggtaactgggatgactatgttgctgatactgaacaagatgaccaagaagcacctaatcgccggcgactacgtactaaccgtagaggtatgg

SEQ ID NO: 421 - DNA, 1534 bp, Zea mays
  source: /note="Zea mays BAC clone full insert sequence contig bacm.pk024.f21.fis25"
ttggcatcactagtacaatatttacggtactgccattctgctagttccatccatcctttgcacctgtgcccagcaatatagtttcgtgttttgcactataattcaactttgcattattgtttgatcgtgctaatccttgacttgagtgcagcctacccacaactccacatatttctacgacgagccggtttctgtttctccacgcaatcgctcaaacaatctttcaccggttccacctgttgattgcagttcaccactgtggcttggtaagaacagataagaactttttgtcgttggtttttatccttttggtgtttgcgctaactatggcaggagcacacgacatggtggatgcccagttgaaggaagtaaggggacaagttgatggacttgctgctgacattaggacgatgcatgaacggcttgattcaacgatcacttcgacgaccgagcgtttcaaccaacttgaccttgctcaaacggcgactcgcaccacactcgacaccatcctggcacgccttgatgcattgaccacaaagatggagcaggaatacggcggtgacactgacaggacgatggagatcgccgtggtcgtgcacgtcgtgtggttcgtcatccccctaatgacttattttctaagattaaatttaaaattccatcttttaatggtaaatatgatcctgctgcataacttgattgggaattagaggtagaacagaaattttcatgccatgatattcctgctaatagccaagtgaacgctgccattagtgaatttactgattttgctttaatttggtggcgtgagtataaacaaaaacttcccattaacagtgtcattacttggacccaattaaaaactgccatgcgccacagatttgttccttcctattatgctcgtgatttgcttaacaaaatgcagcgttttcaacaaggttcacaatttgttgaggaatattaccaggagttgcaaaagggtatgcttcgttgtggtttggttgagtcagatgacgctgctatggcgcgttttcgtggtggtttgaatagggaaattcagggtatacttgattataaggattattttgatataaccacattgtttgaatatgcttgcaaagctgaacgtgaagtgcagggacgacgatcaaagacatatactaactcttttgcaggccggggtccaacacacagctcaactccttccagccctgcacctcctacgcctagcactacatcgcacacagggacgaccaagccagtggcgccccctgccaaaggcgccgcttcttccacaggacgtacacgggatattcagtgccatcgttgcagagggattgggcacatgattcgggactgcccaaacaagcgtaccttgcttatacgtgacaatggtgagtactcttcagccagtgattctgaggaaactagtcatgctatgattgccactaaccatgcagaaaatgaggaagtccacgttgatcccatcgacgccgataggtatgagagtcttggtgtgcagcgtgttctcagcacc

SEQ ID NO: 422 - DNA, 974 bp, Zea mays
  source: /note="Zea mays BAC clone full insert sequence contig bacm.pk024.f21.fis26"
ggtccaaaactcatgtttagggtggtttcgcgcaatttcgttgccgcacgtcacccattccgaaaacgggtgttggggtgcatacaaagcacgagttttcgccaccggaaccatttcttcgttttttgcaacgaacatgcccaatccactactttaggtccaaaactcatgtttggggtggttccgcgcaatttcgttgccgcacgtcacacatttccaaaacgggtgtcggggtgcatacaaagcacgagtttttgctaccggaaccaattcttcttttttcgcaacgaacatgcccaatcctctactttaggtccaaaactcatgtttggggtggtttcgcgctatatcattgcagcacgtcacccattccgaaaacgggtgtcgggtgcatacaaagcatgagttttcgccaccggaaccatttctttgttattcgcaacgaacatgcccaatccagtactttatgtccaaaactcatgtgtggggtggtttcgcgcaatttcgttgtcgtacgtcacccatttccaaaacgtgtgtcggggtgcatacaaagcacgagtttttgccaccggaaccaattcttcattttttgcaacgaacatgcccaatcctctactttaggtccaaaactcatgtttggggtggtttcgcgctatatcattgccgcacgtcacccattccggaaacgggtgtcgagtgcatacaaagcatgagttttcgccaccggaaccatttctttgttattcgcaatgaacatgcccaatccactactttatgtccaaaactcatgtgtggggtggtttcgcgcaatttcattgtcgtacgtcacccatttccaaaacgggtgtcggggtgcatacaaagcacgagtttttgccaccggaaccaattcttcgtttttcgcaacgaacatgtccaatcctctactttaggtccaaaactcatgtttggggttgtttcgcgctatatca

SEQ ID NO: 423 - DNA, 868 bp, Zea mays
  source: /note="Zea mays BAC clone full insert sequence contig bacm.pk024.f21.fis27"
tgtatgcaccttgacacccgttttcggaatgggtgacgggcggcaacgatatagcgcgaaaccaccccaaacatgagttttggacctaaagtagaggattgagaatgttcgttgcgaaaaacgaagaaatggttccggtgccaaaaagtcgtgctttgtatgcaccccgacacccgtttttggaatgtgtgacgtctcgcaacgaaattgcgcgaaaccaccccaaatatgagtttttacctaaagtagtggactgggcatgttcgtagcgaaaaacgaagaattggttccggcggcgaaaactcatactttgtatgcacccgacacccattttcggaatgggtgacgtgcggctacgaaattgcgcgaaaccaccccaaatatgagttttggacctaaagtagtggattgggcatgttcgttgcgaaaaacgaagaaatggttccggtggcaaaaactcgtgcattgtatgcaccctgacacccgttttcggaatgggtgacgggcggcaacgatatagcgcgaaaccaccccaaacatgagttttggacctaaagtagaggattgggaatgttcgttgtgaaaaacgaagaattggttccggtggcaaaaactcgtgctttgtatgcaccccgacacccgttttgggaatgtgtgacgtacgacaacgaaattacgcgaaaccacgccaaacatgagttttggacataaagtagtggattgggcatgttcgttgcgaaaaacgaagaaatggttccggtggcgaaaactcatgctttgtatgcacccgacacccgttttcggaatgggtgacgtgcgacaatgatatagcgcgaaaccaccccaaacatgagttttggacctaaag

SEQ ID NO: 424 - DNA, 1470 bp, Zea mays
  source: /note="Zea mays BAC Clone full insert sequence contig bacm.pk024.f21.fis28"
ttttgggaatgggtgacgtacggcaacgaaattgcgcgaaaccaccccaaacatgagttgtggacctaaagtagtggattgggcatgctcgttgcaaaaatcgaagaaatggttccggtggcgaaaactcgtgctttgcatgcaccccgacacctgttttcggaatgggtgacgtgcggcaacgaaattgcgcgaaagcaccccaaacataagttttggatctaaagtagtggattgggcatgttcgttgcgaaaaacgaagaaatggttccggtggcaaaaactcgtgctttgtatgcaccccgacacccgttttcggaatgggtgacgtgcggcaatgatatagcgcgaaacaaccccaaacatgagttttggacctaaagtagaggattggacatgttcgttgcgaaaaaagaagaattggttcccgtggcaaaaactcgtgctttgtatgcaccccgacacccgttttggaattgggtgacgtacgacaatgaaattgcgcgaaaccaccccacacatgagttttggacataaagtagtggattgggcatgttcattgcgaataacaaagaaatggttccggtggcaaaaactcatgctttgtatgcacccgacacccgttttcggaatgggtgacgtgcggcaatgatatagcgcgaaaccaccccaaacatgagttttggacctaaagtagaggattgggcatgttcgttgcaaaaaaagaagaattggttccggtggcaaaaactcgtgctttgtatgcaccccgacacacgttttggaaatgggtgacgtacgacaacgaaattgcgcgaaaccaccccacacatgagttttggacataaagtactggattgggcatgttcgttgcgaataacaaagaaatggttccggtggcgaaaactcatgctttgtatgcacccgacacccgttttcggaatgggtgacgtgcggcaatgatatagcgcgaaaccaccccaaacatgagttttggacctaaagtagaggattgggcatgttcgttgcgaaaaaagaagaattggttccggtagcaaaaactcgtgctttgtatgcaccccgacacccgttttggaaatgtgtgacgtgcggcaacgaaattgcgcggaaccaccccaaacatgagttttggacctaaagtagtggattgggcatgttcgttgcaaaaaacgaagaaatggttccggtggcgaaaactcgtgctttgtatgcaccccaacacccgttttcggaatgggtgacgtgcggcaacgaaattgcgcgaaacaccctaaacatgagttttggacctaaagtagtggattgggcatgttcgttgcaaaaacaaaataatggttccggtggcaaaaactcgtgctttatgccccccgaacaccgttttcggaaaaggtgaagtgcagcaacccaatatcgccggaccacccccaacagggatcttggaaccaaaga

SEQ ID NO: 425 - DNA, 1672 bp, Zea mays
  VARIATION (47)..(47): /replace="c" or "g" or "t"
  misc_feature (47): /note="Nucleotide given in the sequence has no preference with respect to those in the annotation for said position"
  VARIATION (1530)..(1530): /replace="c" or "g" or "t"
  misc_feature (1530): /note="Nucleotide given in the sequence has no preference with respect to those in the annotation for said position"
  source: /note="Zea mays BAC clone full insert sequence contig bacm.pk024.f21.fis29"
tggtgatatggtttggttgcatttgagaaaggatcgttttcctactatgcgccgttctaaattgatgcctcgtgctgctggtccttttaaggtactaaccaagattaatgataatgcttatatccttgacctgcctgcggagtttggtgtttccactagttttaatgttgcagatttgaaaccgtatgcgggagaagatgaggagttgccgtcgaggacgacttcagttcaagaaggggaggatgatgcggacatcaacaccaacacgagcacatctacaccagcagcaccttctccagcccaggcgccaccacttccacctgggccagtgactcgggcccgtgcaagagaattgaactacatcatgttgttaaagaacgaaggcccggaagaatagacgaccagcccaattgcggcccataatggacgacctagggttggccgcccctaggggctgcgccccctctctatttattcaggagctgcgcctcctttatttcccgagttttgttttacgttagccttagctactctcgaacacgcgctaatctgtgctgtctttgtgtattcagaactccaccctcgagtaatagattaggttgctcgcatcttgttcttgttcgttcttcgattgcgcacaggaaacgatcttcgtgatcaggccgatctcgcatcagcaaggtcggtaaccacagggagttggttcagcgattgcattggcgcctcgggcttgctcgtcgtagtcggatcgcaagggtcatcttccgccaaatcggaattatctctactcgccgaaagatcgggcacctcagctacatcccattccgaaaacagctgtcgggtgcatacaaagcatgagttttcgtcaccggaaccatttcttcgttttccgcaacgaacatgcccaatccactactttaggtctaaaactcatgtttggggtggtttcgcgcaatttcgttgccgtacgtcacccattcccaaaacgggtgtcggggtgcatacaaagcaggagtttttgccaccggaaccaattcttcgtttttcgcaacgaacattcccaatcctctactttaggtccaaaactcatgtttggggtggtttcgcgctatatcattgtcgcacgtcacccattccgaaaacgggtgtcgggtgcatacaaagcatgagttttcgccaccggaaccatttcttcgtttttcgcaacgaacatgcccaatccactactttatgtccaaaactcatgtttggcgtggtttcgcgtaatttcgttgtcgtacgtcacacattcccaaaacgggtgtcggggtgcatacaaagcacgagtttttgccaccggaaccaattcttcgtttttcacaacgaacattcccaatcctctactttaggtccaaaactcatgtttggggtggtttcgcgctatatcgttgccgcccgtcacccattccgaaaacggttgtcagggtgcatacaatgcacgagtttttgccaccggaaccatttcttcgtttttcgcaacgaacatgcccaaatccactacttttaggcccaaaactcatattttggggggggttcgcgcattttcttagccggcggtcacccattccgaaaaatggggtgtcgggtgcctaacaagcacgaagttttcgcccccggaacaatttctcctttt

SEQ ID NO: 426 - DNA, 2721 bp, Zea mays
  source: /note="Zea mays BAC clone full insert sequence contig bacm.pk024.f21.fis30"
tgctgatgctttgtctcgtcgctataccatgctgtcacagttagattttaaaatctttggtttggacactgtgaaggatcaatatgttgacgatgctgattttaaagatgctttcggccattgtattaatgggaaaccatggggcaaatttcacatacaggatgggttcttgtttcgcgctaacaagctgtgtgttccagctagctcggttcgtcttttgttgttacaggaagcgcatggaggcggtctcatggggcattttggcgtctacaagacacatgaggtgttggctgcccacttcttttggcctcggatgcgcgctgatgtggagcgccttgttgcacgctgcactacttgtcagaaagctaagtcacggttgaacaaccatggtttgtatatgcctttgcctgtcccttcttctccttggcttgatatctctatggactttgttttgggcttgcctagaactaagaaggggagggatagtatttttgtggttgttgatagattctctaaaatggctcactttataccttgtcataaaactgatgatgctagcattgttgctgaattgttctttagagaaattattcgtttacatggtattccaaaaacaatagtctctgatcgcgatggtaagtttctaagccatttttggagatctctttggaataaattgggaactaagttgttgcttagcactacttgtcacccttagactgatggacaaactgaggtagtaaatagaactttatctaccatgcttagggctgttttagacaagaatttgagacgttgggaggattgcttgcctcatgttgaatttgcttacaatcatgccacgcattcttctacaaagatgtgccctttccagattgtttatggttacattcctagggcacctattgatttgatttcacttaatgctgcgaacgccccacatgtagatgcttctgcacatgttgaacaaatgattaccatacatgaacaaacgaaacagaacattgctgctactaatgcaaaaaatcaggttgctggtcgtaaaggaagaaaacatgttacttttgaacctggtgatatgatttggttgcatttgagaaaggatcgttttcctactttgcgccgttctaaattgatgcctcgtgctgctggtccttttaaggtactaaccaagattaatgataatgcttatatccttgacctgcctgcggagtttggtgtttccactagttttaatgttgcagatttgaaaccgtatgcgggagaagatgaggagttgccgtcgaggacgacttcagttcaagaaggggaggatgatgcggacatcaacaccaacacgagcacatctacaccagcagcaccttctccagcccaggcgccaccccttccacctgggccagtgactcgggcccgtgcaagagaattgaactacatcatgttgttaaagaacgaaggcccagaagaatagacgaccagcccaattgcggcccataatggacgacctaaggttggccgcccctaggggctgcgcccccctctctatttattcaggagctgcgcctcctttattttccgagttttgttttacgttagccttagctactctcgaacacgcgcaaatctgcgctgtcttcgtgtattcagaactccaccctcgagtaatagattagattgctcgcctctttttcttgttcgttcttcgattgcgcacaggaaacgatcttcgtgatcaggccgatctcgcaacagcaaggtcggtaaccacagggagttggttcagcgattgcattggcgcctcgggcttgctcgtcgtagtcggatcgcaagggtcatcttctgccaaatcggaattatctctactcgccgaaagatcgggcacctcagcttcatcatagccgccaccaagaacaacgggtttttgtttagatcaagtttagctctcgctacttgcttgtaagcgcgcgtgctagttcagccgcccgtcttcttgtcttcggaaccccacccatattggagtttgattttgaaacctgcatttagatctggtaattcagtacttgttctacttgttcttgctagttcttcgattgcttgcaggacgagtgccctagtggccagggtgtcacgctccacaagatcgtgacagccataggaggtggtgtatcggttgctaaggcgcagcgtctttggaaggctgtagtcgggccgtgaacgtcgtctcctcccccaatcgagttattccacaccctctcatcgaaagatcgggcaatcacccaacgggtgcacatcagttggtatcagagcaaggtttatcggtgagagatttacttttcttcgctgttttcttatctcctatagtccagaaaaagccaaaaaatagtagattagttttaccgcaatcctataaaccattgagcatttactagtactacttagttagggcttgttgagtttttggttgcatcggttgtgtcgagttgctggtcttagtttattcctttagagttttgagttctaccacgttttggtcaccacgagatccaccatcaccaaaaacatctctggttcgtttttgccaccacggatacatatcatatccgatttggagtttaaatacaatctggaaagcttatcttatcttctttccaacggatctgaccttatctcaaaattcgttctgagcgcttcgcaatcatcgtagagaatttctggactttctat

SEQ ID NO: 427 - DNA, 2180 bp, Zea mays
  source: /note="Zea mays BAC clone full insert sequence contig bacm.pk024.f21.fis31"
gaccgcgtatagactcactatagggcgaatgggtctaatcacaacgcgcgaggtcgacggtatcttaccaccttgatcccacctacaactctacatatttcgactacagtttgacaggtcgtgttgctgcggcaccgatacacttattccacggttgcagacttgttggttgctgacccctcctgttgtgcaaggtaagaattggtaagagcttgtgaggcaggttgagagtgagcgccttgcagtagctacatcctaatagttgtagagtttttattccttcacattttttttcttgttgcctctgttcatctaaccatggcaggattggaggttgatgatgcttctcgtaatatgccacactctcctcgcaccaagggtatcatacaacactttgtaaggctggtgaaaacgcacacggaaggtcttgataatgacatgcaggtgacgaatgaaaagatggggcaattggaggccacacagatcgacacaaacaccaaacttgcaaatgtggaaatgacagttgctcatattgacaagagccttgtcgcactcttgaggcgatttgatgagatgcatgctaataccaatggtgggcgtgatgagggcgccgaaggtaactgggatgactatgttgctgatactgaacaagatgaccaagaagcacctaatcgccggcgactacgtactaaccgtagaggtatgggtggttttcgccgacgtgaggtacatggtaatgatgatgcttttagtaaggttaaatttaaaatacctccttttgatggtaaatatgaccctgatgcttacattacttgggagattgcggttgatcaaaagtttgcatgccatgaatttcctgagaatgcgcgggttagagctgctactagtgagtttactgaatttgcttctgtttggtggatagaacatggtaagaagaattctaataacatgccacaaacttgggatgcgttgaaacgggtcatgcgggctagatttgttccttcttattatgcacgtgatatgttaaacaagttgcaacaattgagacagggtactaaaagtgtagaagaatattatcaggaattacaaatgggtatgctgcgttgtaacatagaggagggtgaggaatctgctatggctagatttttgggcgggttaaatagggaaattcaggacatccttgcttataaagattatgctaatgtaacccgattgtttcatcttgcttgcaaagctgaaagggaagtgcagggacgacgtgctagtgcaaggtctaatgtttctgcaggaaaatctacaccatggcaacagcgcacgactacgtccatgaccggccgtacaccagcaccaactccctcgccaagtcgaccagcacccccgccttcctccggcgacaaaccacgtgcatcttccacaaattcaacaaccaaatctgcccagaaaccagcaggtagtgcctcttcagtagcctccacgggtagaacaagagatgttctgtgttatcgatgcaagggctatggacacgtgcagcgtgattgtcctaatcagcgtgttttggtggtaaaagacgatggtgggtattcctctgctagtgatttggatgaagctacacttgctttgcttgcggctgatgatgcaggcactaaggaaccacccgaagaacagattggtgcagatgatgcagagcattatgagagcctcattgtacagcgtgtgcttagtgcacaaatggagaaggcagagcagaatcagcgacatacgttgtttcaaacaaagtgtgtcattaaggagcgttcatgtcgtttgatcattgatggaggtagttgcaacaacttggctagcagcgacatggtggagaagcttgcacttacgaccaaaccgcacccacatccatatcacattcaatggctcaacaatagtggtaaggtcaaggtaaccaagctggtacgaattaattttgctattggttcatatcgtgatgttgttgactgtgatgttgtgcctatggatgcttgtaatattctgctaggtagaccatggcaatttgattcagattgtatgcatcatggtagatcaaatcaatattctctcatacaccatgataagaaaattattttgcttcccatgtcccctgaggctattgtgcgtgatgatgttgctaaagctaccaaagctaaaac

SEQ ID NO: 428 - DNA, 1958 bp, Zea mays
  source: /note="Zea mays BAC clone full insert sequence contig bacm.pk024.f21.fis32"
gctccgaatttgtgtgaccgtcgtcggtgtaggccactcccgaatggcagcaatcttgctgctatccacctcaatgccctgcggagtaaccacataaccaagaaacgagacacattgcgtgcaaaatgtgcacttttccatgttaccaaacaagcgggcagcacgcaaagcatcaaaaacagcacgcaaatgttctaaatgctcctctatagacttgctgtaaataaggatatcatcgaaataaacaacaacaaacaaacctatgaaggcccgtagaacttcgttcattaaacgcataaaggtgctgggagcattagtcaatccaaatggcataaccaaccattcatataaaccaaatttcgttttaaaagccgttttccattcatcaccgagtttcattctaatctgatggtaaccgctacgcaaatcaaccttagagaaaataacggcaccactaagctcatctagcatatcatcaaggcgtggaataggatatcgataacgaactgtgatgttattaatagcacgacaatctacgcacatacgccatgacccatctttctttggaacgagtaaaacagggaccgagcaagggctaagagactcacgaatgtaacccttatcaagcagcgtctgcacctggcgctggatctccttcgtctcatctggatttgtacggtacggggcgcggttcggaagagaagcgccggggatgagatcgatctgatgctcaatgccacggaggggaggaagacccggtggtaagtccgtaggataaacatcagcatactcctgcaaaaggttaacaacagcagggggtatatccaaagacggtgcatcatcaagcggaacaagcattcgcgagcatacaagtgcataacagggcatatgagcttcatggagatcatcaaaatcagcacgtgtagcaagtaaaacaggagagtgcaacttgatttcagatttaataggtgcggctgatgtcgatttgacttgttgtgcagttttagcagccctagtaagatcatctttcaaaatttggtcaggggtcattggatgtataattattttctggcctttaaacatgaaagaataatgatttgaacgaccatgatgtaaactatcagtatcatattgccaaggtcgacctaataacaaagagcatgcttccataggaataacatcgcaatcagcataatcagaataagaacccagcgaaaaggggacacgtaccgaacgtgttacctttattttaccaccatcattaagccattgaatgtgatacggatgtggatgtgtgcgagtgggcaaggataatttctctaccaacgctgtacttgccaaattgttgcagctgccactatcgatgatgatgcgaatcgaccgttcgtgcacgacgcccttggtatggaatagagtgtgtcgctgatttttttcggcctgggcaacctgtgtgctgagaacacgctgcacaacaagactctcatacctatcggcgtcgatgggatcaacgtggacttcctcattttctgcatggttagtggcaatcatagcatgactagtttcctcagaatcactggctgaagagtactcaccattgtcacgtataagcaaggtacgcttgtttgggcagtcccgaatcatgtgcccaaaccctctgcaacgatggcactgaatatcccgtgtacgtcctgtggaagaagcggcgcctttggcagggggcgccactggcttggtcgtccctgtgcgcgatgtagtgctaggcgtagaaggtgcagggctggaaggagttgagctgtgtgttggaccccggcctgcaaaagagttagtatatgtctttgatcgtcgtccctgcacttcacgttcagctttgcaagcatattcaaacaatgtggttatatcaaaataatccttataatcaagtatatcctgaatttccctgttcaaaccaccacgaaaac

SEQ ID NO: 429 - DNA, 3573 bp, Zea mays
  source: /note="Zea mays BAC clone full insert sequence contig bacm.pk024.f21.fis33"
ttgggaatgtttgttgcaaaaatccgaagaattggttccggtggcgaaaactcgtgctttgcatgcaccccgacacccgttttcggaatgggtgacgtgcggcaacgaaattgcgcgaaagcaccccaaacataagttttggatctaaagtagtggattgggcatgttcgttgcgaaaaacgaagaaatggttccggtggcaaaaactcgtgctttgtatgcaccccgacacccgttttcggaatgggtgacgtgcggcaatgatatagcgcgaaacaaccccaaacatgagttttggacctaaagtagaggattgggcatgttcgttgcgaaaaacgaagaattggttccggtggcaaaaactcgtgctttgtatgcaccccgacacccgttttggaaatgggtgacgtacgacaacgaaattgcgcgaaaccaccccacacatgagttttggacataaagtagtggattgggcatgttcattgcgaataacaaagaaatggttccggtggcaaaaactcatgctttgtatgcacccgacacccgttttcggaatgggtgacgtgcggcaatgatatagcgcgaaaccaccccaaacatgagttttggacctaaagtagaggattgggcatgttcgttgcgaaaaaagaagaattggttctggtagcaaaaactcgtgctttgtatgcaccccgaaacccgttttggaaatgtgtgacgtgcggcaacgaaatagcgcggaaccacccaaaacaagagttttggacctaaagtagtggattgggcatgttcgttgcaaaaaaacgaagaaatggttccggtggcgaaaactcgtgctttgtatgcaccccaacacccgttttcggaatgggtgacgtgcggcaacgaaattgcacgaaaccaccccagacatgagttttggacctaaggtagtggattgggcatgttcgttgcgaaaagcgaaaaatggttccggtggcaaaaactcgtgctttgtatgcaccccgacaaccgttttcggaatgggtgacgtgcagcaacgatatagcgcgaaaccaccccaaacatgagttttggacctaaagtagaggattgggaatgtttgttatgaaaaatgaagaattggttccggtggcgaaaactcgtgctttgtatgcaccccaacacccgttttcggaatgggtgacgtgcggcaacgaaattacgcgaaaccaccccaaacatgagttttggacctaaagtagtggattgggcatgttcgttgcgaaaagcgtaaaatggttccggtggcaaaaactcgtgctttgtatgcaccccgacacccgttttggaaatgggtgacgtacgacaacgaaattgcacgaaaccaccccacacatgagttttggacataaagtactggattgggcatgttcgttgcgaataacaaagaaatggtttcggtggcgaaaactcatgctttgtatgcacccgacacccgttttcggaatgggtgacgtgcggcaatgatatagcgcgaaaccaccccaaacatgagttttggacctaaagtagaggattgggcatgttcgttgcgaaaaaagaaggattggttcctgtagcaaaaactcgtgctttgtatgcaccccgacacccgttttggaaatgtgtgacgtgcggcaacgaaattgcgcggaaccaccccaaacatgagttttggacctaaagtagtggattgggcatgttcgttgctaaaaacgaagaaatggttccggtggcgaaaactcgtgctttgtatgcaccccaacacccgttttcggaatgggtgacgtgccgcaacgaaattgcgtgaaaccaccccaaacatgagttttggacctaaagtagtggattgggcatgttcgttgcgaaaagcgaaaaatggttccggtggcaaaaactcgtgcattatgcaccccgacaaccgttttcggaatgcgtgacgtgcagcaacgatatagcgcgaaaccaccccaaacatgagttttggacctaaagtagaggattgggaatgttcgttgcgaaaaacgaagaattggttccggtggcaaaaactcgtgctttgtatgcaccccgacacccgtttttgaaatgggtgacgtacggcaacgaaattgcgcgaaaccactccaaacatgagttgtggacctaaagtagtggattgggcatgctcgttgcaaaaatcgaagaaatggttccggtggcgaaaactcgtgctttgtatgcaccccgacacctgttttcggaatgggtgacgtgcggcaacaaaattgcgcgaaagcaccccaaacataagttttggatctaaactagtggattgggcatgttcgttgcgaaaaacgaagaaatggttccggtggaaaaaactcgtgctttgtatgcaccccgacacccgttttcggaatgggtgacgtgcggcaatgatatagcgcgaaacaaccccaaacatgagttttggacctaaagtagaggattggacatgttcgttgcgaaaaacgaagaattggttccggtggcaaaaactcgtgctttgtatgcaccccgacacccgttttggaaatgggtgacgtacgacaatgaaattgcacgaaaccaccccacacatgagttttggacataaagtagtggattgggcatgttcattgcgaataacaaagaaatggttccggtggcgaaaactcatgctttgtatgcacccgacacccgtttccggaatgggtgacgtgcggcaatgatatagcgcgaaaccaccccaaacatgagttttggacctaaagtagaggattgggcatgttcgttgcgaaaaaagaattggttccggtagcaaaaactcgtgctttgtatgcaccccgacacccgttttggaaatgtgtgacgtgcggcaacgaaattgcgcggaaccaccccaaacatgagttttggacctaaagtagtggattgggcatgttcgttgcaaaaaacgaagaaatggttccggtggcgaaaactcgtgctttgtatgcaccccaacacccgtttttggaatgggtgacgtgcggcaacgaaattacgcgaaaccaccccaaacatgagttttggacctaaagtagtggattgggcatgttcgttgcgaaaagcaagaaatggttccggtggcaaaaactcgtgctttgtatgcaccccgacacccgttttggaaatgggtgacgtacgacaacgaaattgcgcgaaaccaccccacacatgagttttggacataaagtactggattgggcatgttcgttgcgaataacaaagaaatggtttcggtggcgaaaactcatgctttgtatgcacccgacacccgttttcggaatgggtgacgtgcggcaatgatatagcgcgaaaccaccccaaacatgagttttggacctaaagtagaggattgggcatgttcgttgcgaaaaaagaaggattggttcctgtagcaaaaactcgtgctttgtatgcaccccgacacccgttttggaaatgtgtgacgtgcggcaacgaaattgcgcggaaccaccccaaacatgagttttggacctaaagtcg

SEQ ID NO: 430 - DNA, 5369 bp, Zea mays
  VARIATION (5229)..(5229): /replace="c" or "g" or "t"
  misc_feature (5229): /note="Nucleotide given in the sequence has no preference with respect to those in the annotation for said position"
  VARIATION (5307)..(5307): /replace="c" or "g" or "t"
  misc_feature (5307): /note="Nucleotide given in the sequence has no preference with respect to those in the annotation for said position"
  source: /note="Zea mays BAC clone full insert sequence contig bacm.pk024.f21.fis34"
tgaattgcagcaagaggtctaaactggtgattgaaacaaggtggcgcgaactcgaaactctagcggtaagaaaactttagaccagcaactcgacccaaatgcagcaaccgtgaattcaacaagtcgaaaactaagtagtaaagcaaaggctcaaactgtttttaggtgaatttatgatctaaatatatctttgggcaaaagtggactgtaggtaaataaaacaaggaagattgagttctctcaccgagcaacctggctttgataccacttgataaacccaacgggtagaagggtgcccgatctttcgatgagagatgatggaggtggaaaacttgttggagaacgacgttggctgcccgactaccacaaccaagatggtgtggcgccttgagcgacaggtacaccgtctcctggtaactacgatttggggtggaggtcgacgttgtgctatccgactacaacaaccacaagggtgctgcaccttagcgatagttacaccggctcctgttgttgctgctcttgtcgtgccaagaacaaccttgaacctgcaagcaatcgagaacaagcaagaacaagataaaaagcagacgctcacggatctgatagagttggggttctgtttcaagtatccgggtggtctagccgacacacgcgtttacaaggaagtagcaaaggctaaacttacatcaaacaaaaacccaagttctttggtggctgctagttgcttaaatagaggaatagaaaggagttctaatggagaacgaaactctctcggcagtttctggatgcctcgtttgggttctgtcattgattcttgatgcacatgaaagtagacgaagagagctttccaacaagtagttatttgcactaaacaaccttgggagtggaaagttatgctccatttaatttggtgcatgctgcagttacgaaattgacttgggtagagcaggagttcactcggcagtttctggacgcttagtgtctctcgttgattcttgatccactaaaaagtagatgaagagaactttccaacaagtgcttatttgcattaaacaaccttgggagctgaaagatatgccctcttaaacttgcacttgttgtagtttcgaaatcccctcaagtggagcagcttttattgccttgttgccttctcaaattctagatggttcacctcccaaacaccttagaataataaagtaatcacaaggtatcagtacctcatttaaggaatgattagcttcaacaacaaggaacgagttcacctgataattaaatttacgtgcacggactcgtttcactggtccatgattaaatggtgaaggaggtcgctggtgtggtgtattgatgacagtgatgtcctcatcacccgttttcggaatgggtgacgtgcagcaatgaaattgcgcgaaaccaccccaaacatgagttttggacctaaagttgtggattgggcatactcgttgcaaaaaacgaagaaacggttccggtggaaaaaactcgtgctttgtatgcaccccgacacccatttttggaatggcggacgtgcggcaacgaaattgcgcgaaaccacaccaaacataagttttggacctaatgtagtggattgggcatgttcgttgcgaaaaacgaagaattggttctggaggcaaaaactcgtgctttgtattcaccccgacacccgttttcggaatgggtgacgtgcggcaatgatatagcgtgaaacaaccccaaacatgagttttggacctaaagtagaggattgggcatgttcgttgcgaaaaacgaagaaatggttccggtggcaaaaactcgtgctttgtatgcaccccgacacccgttttggaaatgggtgacgtacaacaacaaaattgcgtgaaaccaccccacacatgagttttggacctaaagtagtggattgggcatgttcgttgcgtatagcaaagaaatggttccggtggcaaaaactcatgctttgtatgcacccgacacctgttttcggaatgggttacgtgcggcaacgaaatttcgcgaaaccatcccaaacatgagttttggacctaaagtagtggattgggcatgttcgttgcgagaaacgaagaaatggttccggtggcgaaaactcgtgctttgtatgcacacgacacccgttttcggaatgggtgacatgcggcaacgaaattgcgcgaaaccaccccaaacttgagttttggacctaaagtagtggattgggcatgttcgttgcaaaaaacgaagaaatgattccggtggcgaaaactcgtgctttgtatgcaccccgacacccgttttcggaatgggtgacgtgcggcaacgaaattgcgcgaaaccaccccaaacatgagttttggacctaaagtagtggattgggcatgttcgttgcgaaaagcgaaaaatgcttccggtggcaaaaactcgtgctttgtatgcaccccgacaccctttttcggaataggtgacgtgtggcaacgatataacgcgaaacaaccccaaacatgagttttggacctaaagtagaggattgggaatgttcgttgcgaaaaacgaagaattggttccggtagcaaaaactcgtgctttgtatgcaccccgacacccgttttgggaatgggagacgtacggcaacgaaattgcgcgaaaccaccccaaacatgagttttggacctaaagtagtggattgggcatgttcgttgcggaaaaagaagaaatggttccggtggcgaaaactcatgctttgtatgcacccgacacccgttttcggaatgggtgacgtgcagcaacgaaattgtgtgaaaccaccccaaacatgagttttggacttaaagtagtggattgggcatgttcgttgcgaaaaacgaagaaatggttccggtgtcaaaaactagtgctttgtatgcaccccgacacccgttttcggaatgtgtgacgtcccacaacgaaattgcgcgaaaccaccccaaatatgagtttttacctaaagtagtggattgggcatgtttgttgcgaaaaacgaagaattggttcaggtggcgaaaactcgtgctttgtatgcaccccgacacccgttttgggaatgggtgacgtacgacaacgaaattgcgtgaaaccacccctgatgtagctgaggtgcccgatctttcggcgagtagagataattccgatttggcggaagatgacccttgcgatccgactacgacgagcaagcccgaggcgccaatgcaatcgctgaaccaactccctgtggttaccgaccttgctgatgcgagatcggcctgatcacgaagatcgtttcctgtgcgcaatcgaagaacgaacaagaacaagatgcgagcaatctaatctattactcgagggtggagttctgaatacacgaagacagcgcagatttgcgcgtgttcgagagtagctaaggctaacgtaaaacaaaactcaggaaataaaggaggcgcagctcctgaataaatagagagggggcgcagcccctaggggcggccaaccctaggtcgtccattatgggccgcaattgggctggtcgtctattcttccgggccttcgttctttaacaacatgatgtagttcaattctcttgcacgggcccgagtcactggcccaggtggaaggggtggcgcctgggctggagaaggtgctgctggtgtagatgtgctcgtgttggtgttgatgtccgcatcatcctccccttcttgaactgaagtcgtcctcgacggcaactcctcatcttctcccgcatacggtttcaaatctgcaacattaaaactagtggaaacaccaaactccgcaggtaggtcgagggtataagcattatcattaatcttggttagtatcttaaaaggaccagcagcacaaggcatcaatttagaacagcgcaaagtaggaaaacaatcctttctcaaatgcaaccaaaccatatcaccaggttcaaaagtaacatgttttcttcctttactaccagcaacctgattttttgtattagtagcagcaatgttctgtttcgtttgttcatgtatggtaatcatttgttcaacatgtgcagaagcatctacatgtggggcgttcgcagcattaagtgaaatcaaatcaataggtgccctaggaatgtaaccataaacaatctggaaagggcacatctttgtagaagaatgcgtggcatgattgtaagcaaattcaacatgaggcaagcaatcctcccaacgtctcaaattcttgtctaaaacagccctaagcatggtagataaagttctatttactacctcagtttgtccatcagtctgagggtgacaagtagtgctaaacaacaatttagttcccaatttattccatagagatctccaaaaatggcttagaaacttagcatcgcgatcagagattattgttttttggaataccatgtaaacgaataatttctctaaagaacaattcagcaacaatgctagcatcatcagttttatgacaaggtataaagtgagccattttagagaatctatcaacaaccacaaaaatactatccctccccttcttagttctaggaaagcccaaaacaaagtccatagagatatcaagccaaggagaagaagggacaggcaaaggcatatacaacccatggttgttcaaccgtgacttagctttctgacaagtagtgcagcgtgcaacaaggcgctccacatcagcgcgcatccgaggccaaaagaaatgggcagccaacacctcatgtgttttgtagacgccaaaatgccccatgagaccgcctccatgcgcttcctgtaacaacaaaagacgaaccgagctagctggaacacacagcttgttagcacgaaacaggaacccatcctgtatgtgaaatttgccccatggtatcccattaatacaatggccgaaagcatctttaaaatcagcatcgtcaacgtattgatccttcacagtgtccaaagcctcatgatcagaatgaattatgaactcacgatgccaaagataatgctgccaagtatgcaaagtgcgcactaaagcgtaaagctccttatcataagtagaatatttcagactagcaccgcttaatttttcactaaaataagcaactggttttccttcttgtaacaaaacagcacctagcccaataccgctagcatcgcattcaagctcaaaaactttattaaaatcaggcaattgcaagaggggagcttgggttaacttatctttcaaagtgctgaacgctacctcctgcgaatcactccaagcaaacggcacatctttctttgtaagctcatgtagaggcgctgacatggagctaaatcacgaacaaatctgcggtagaaaccggcaagtccaagaagctccgaatt

SEQ ID NO: 431 - DNA, 7656 bp, Zea mays
  source: /note="Zea mays BAC clone full insert sequence contig bacm.pk024.f21.fis35"
taatcaaaaggggcgaggtcgacggtattgttccgcttgattttgttgcctcgtgctcctattgatttaatgcctttgccatcttctgaaaaactaaattttgatgctactaggcgtgctgaattgatgttaaaactgcatgaaactactaaagaaaacatagagcgtatgaatgctagatataagtttgctagtgataaaggtagaaaggaaataaattttgaacctggagatttagtttggttgcatttgagaaaggaaaggtttcctgaattacgaaaatctaaattgttgcctcgagccgatggaccgtttaaagtgctagagaaaattaatgacaatgcatataggctagatctgcctgcagactttggggttagccccacatttaacattgcagatttaaagccctacttgggagaggaagttgagcttgagtcgaggacgactcaaatgcaagaaggggagaatgatgaagacatccacactactgatacatctatgccaatacaagtaccaatttctggtcccattactcgcgctcgtgctcgtcaactcaaccatcaggtgattacactcttgagttcatgtccatcttatttagaccatagagacccgtgcactcttgttttgcttaggaaccagggagaagaccgaaagggaaaaggatttgaacatgctggattcggactgcagaagaacaccaacttgtgacggtcaccacggtcagatgcgggctcggattggaatgttcaagcacaacatggaaagcttatcaagtctactttcatatggatccggaattatagtcatatctgttctgaggccgccgtaatcattgttttcttaccgagatattttctgccttttctgcccatggtgctgcgtcaccctattttggcccaatgggtcgtgtatcaagttaggtccattagggacgcatcctagggttgcagcacgaccccaatacccttgtggtcgtcctcccatgtttatagaccccctagtcgccaccaagaacagcgggttttgtttagatcaagtttagctctcgctacttgcttgcaagcgcgcgtgctagttcagccgcccgtcttcttgtcttcggaaccccaccatattggagtttgattctgaaacctacatttagatctggtaattcagtacttgttctacttgttcttgctagttcttcgattgcttgcaggacgagtgccctagtggccagggtgtcacgctccacaagatcgtgacagccataggaggtggtgtatcggttgctaaggcgcagcgtctttggaaggctgtagtcgggccgtgaacgtcgtctcctcccccaatcgagttattccacaccctctcatcgaaagatcgggcaatcacccaacgggtgcacatcacctaaagtagtggattgggcatgttcgttgcgaaaagcgaaaaatggttccggtggcaaaaactcgtgctttgtatgcacccgacaaccgttttcggaatgggtgacgtgcagcaacgatatagcgcgaaaccaccccaaacatgagttttggacctaaagtagaggattgggcatgttcgttgcgaaaaaagaagaattggttccggtagcaaaaactcgtgctttgtatgcaccccgacacccgttttggaaatgtgtgacgtgcggcaacgaaattgcgcggaaccaccccaaatatgagttttggacctaaagtagtggattgggcatgttcgttgctaaaaacgaagaaatggttccggtggcgaaaactcgtgctttgtatgcaccccaacacccgttttcggaatgggtgacgtgcggcaatgaaattacgcgaaaccaccccaaacatgagttttggacctaaagtagtggattgggcatgttcgttgcgaaaaatgaataattggtttcagtggcgaaaactcgtgctttgtatgcaccccgacacccgttttcggaatgggtgacgtgcggcaacgaaattgcgcgaaaccaccccaaacatgagttttggatctaaagtagtggattgggcatgttcgttgcgaaaaacgaagaaatggttccgatggcaaaaactcgtgctttgtatgcaccccgacacccgttttcggaatgggtgacgtgcgtgaactatatagcgcgaaaccaccctaaacatgagttttggacctaaagtccatgttcgttgcgaaaaatgaagaattggttccgttggcaaaaactcttgctttgtatgcaccccgacacccgttttgggaatgggtgacgtacgacaacgaaattctgcgaaaccgccccaaacatgagttttggacctaaagtagtggattgggcatgtttgttgcgaaaaacgaagaaatggttccggtggcaaaaactcgttctttgtatgcacccgacacccgttttcggaatgggtgacgtgcggcaacgaaattgcgcgaaaccaccccaaacatgagttttggacctaaagtagtggattgggcatgctcgttgcaaaaaacgaagaaatggttccagtggcgaaaactcgtgctttgtatgcacccgacacccgttttcggaatgggtgacgtgcgacaacgaaatagcgcgaaaccaccccaaacataaaatttggacctaaagtagtggattgggcatgctcgttgcaaaaaacgaagaaatggttctggtggcaaaaactcgtgctttctatgcaccccgacacccgttttcgaaatgggtgacgtgcggcaatgatatagcgcgaaacaaccccaaacatgagttttggacctaaagtagaggattgggcatgttcgttgcgaaaaaaagaagaattggttccggtggcaaaaactcgtgctttgtatgcaccccgacacccgttttggaaatgggtgacgtacgacaactaaattgcgcgaaaccaccccacacatgagttttggacctaaagtagtggattgggcatgttcgttgttaataacaaagaaatggttccggtggtgaaaactcatgctttgtatgcacctgacacccgtttttggaatgggtgacgtgcaacgaaatttcgcgaaaccaccacaaacatgagttttggacctaaagtagtgtattgggcatgttcgttgcgaaaaacaaagaaatgtttccggtggcaaaaactcgtgcttcgtatgcaccccgacacccgttttcggaatgggtaacgtgcggcaacgatatagcgcgaaaccaccccaaacatgagttttggacctaaagtagaggattgggattgttcgttgcgaaaaacgaagaattggttccggtggcaaaaactcgtgctttgtatgcaccccgacacccgttttgggaataggtgacgtacgacaacgaaattgcgcggaaccaccccaaacatgagttttggacctaaagtagtggattgggcatgttcgttgctaaaaacgaagaaatggttccggtggcgaaaactcgtgctttgtatgcaccccaacacccgttttcggaatgggtgacgtgcggcaacgaaattgcgcgaaaccaccccaaacatgagttttggaactaaagtagtggattgggcatgttcgttgcgaaaagcgaaaaatggttccggtggcaaaaactcgtgctttatgcaccccgacaaccgttttcggaatgggtgacgtgcagcaacgatatagcgcgaaaccaccccaaacatgagttttggacctaaagtagaggattgggaatgttcgttgcgaaaaacgaagaattggttccggtggcaaaaactcgtgctttgtatgcaccccgacacccgttttgggaatgggtgacgtacggcaacgaaattgcgcgaaaccactccaaacatgagttgtggacctaaagtagtggattgggcatgctcgttgcaaaaatcgaagaaatggttccggtggtgaaaactcgtgctttgtatgcaccccgacacctgttttcggaatgggtgacgtgcggcaacaaaattgcgcgaaagcaccccaaacataagttttggatctaaactagtggattgggcatgttcgttgcgaaaaaagaagaattggttccggtggaaaaaaactcgtgctttgtatgcaccccgacacccgttttcggaatgggtgacgtgcggcaatgatatagcgcgaaacaaccccaaacatgagttttggacctaaagtagaagattggtcatgttcgttgcgaaaaacgaagaattggttccggtggcaaaaactcgtgctttgtatgcacaccgacacccgttttggaaatgggtgacgtacgacaacgaaattgcgcgaaaccaccccacacatgagttttggacataaagtagtggattgggcatgttcattgcgaataacaaagaaatggttccggtagcgaaaactcatgctttgtatgcacccgacacccgtttccggaatgggtgacgtgcggcaatgatatagcgcgaaacaaccccaaacatgagttttggatctaaagtagaggattgggcatgttcgttgcaaaacaagaattattggttccggtggaaaaaactcgtgctttgtatgcaccccgacacccgttttggaaatgggtgacgtacgacaacgaaattgcgcgaaaccaccccacacatgagttttggacctaaagtagtggattgggcatgttcgttgtgaataacaaagaaatggttccggtggcgaaaactcatgctttgtatgcacccgacacccgttttcggaatgggtgacgtgcggcaacgaaatttcgcgaaaccaccccaaacatgagttttggacctaaagtagtgtattgggcattttcgttgcaaaaaacgaagaaatggttccggtggcaaaaactcgtgctttgtatgcatcccgacacccatttttggaatgggtgacgtgcggcaacgatatagcgtgaaaccaccccaaacatgagttttggacctaaagtagaggattgggaatgttcgttgcgaaaaacgaagaattggttccggttgcaaaaacttgtgctttgtatgcaccgcgacacccgttttggaaataggtgacgtacgacaacgaaattgcacgaaaccaccccaaacatgagttttggacctaaagtagtggattgggcatgttcgttgcgaaaaacgaagaaatggttccggtggcgaaaactcttgctttgtatgcacccgacacccgttttcggaatgggtgacgtgcggcaacgaaattgcgcgaaaccacaccaaacatgagttttggacctaaagtagtggattgggcatgttcgttgcgaaaaatgaagaaatggttccgatggcaaaaactcgtgcattgtatgcaccctgacacccgttttcggaatgggtgacgtgcggcaacgatatagcgcaaaaccaccccaaacatgagttttggacctaaagtagaggattgggaatgttcgttgcgaaaaacgaagaattggttccggtggcaaaaactcgtgctttctatgcaccccgacacccgttttgggaatggttgacgtacgacaacaaaattgcgcgaaaccaccccaacacatgagttttggacataaaatagtggattgggcatgttcgttgcgaaaaacgaagaaatggttccggtggcgaaaactcatgctttgtatgcacccgacacccgttttcggaatgggtgacgtgcggcaatgatatagcgcgaaagaaccccaaacatgagttttggacctaaactagaggattgggcatgttcgttgcgaaaaaagaagaattggttctggtggcaaaaagtcgtgctttgtatgcaccccgacacccgttttggaaatgggtgacgtacgacaacaaaattgcgtgaaaccaccccacacatgagttttggacctaaagaagtgcattgggcatgttcgttgcgaataacaaagaaatggttccggtggcgaaaactcatgctttgtatgcacccgacacccgttttcggaatgggtgacgtgcgacaacgaaatttcgcgaaaccaccccaaacatgagttttggacctaaagtagtggattgggcatgttcgttgtgaataacaaagaaatggttccggtggcgaaaactcatgctttgtatgcacctgacacccgttttcggaatgggtgacgtgcggcaacgaaatttcgtgaaaccaccccaaacatgagttttggacctaaagtagtgtattgggcatgttcgttgcaataaatgaagaaatggttccggtggcaaaactcgtgctttgtatgcaccccgacacccgttttcggaatgtgtgacgtcccgcaacgaaattgcgcgaaaccaccccaaatatgagtttttacctaaagtagtgtattgggcatgttcgttgcgaaaaacgaagaaatggttccggtggcaaaaactcgtgctttgtatgcaccccgacactcgttttcggaatgggtgacgtgcggcaacgaaattgcgcaaaaccaccccaaacatgagttttggacctaaagtagtggattgggcatgctcgttgcaaaaatcaaagaaatggttccggtggcgaaaactcgtgctttgtatgcaccccgacacctgttttcggaatgggtgacgtgcggcaacgaaattgcgcgaaagcaccccaaacataagttttggacctaaagtagtggattgggcatgttccttgcgaaaaacgaagaaatggttccggtggcaaaaactcgtgctttgtatgcaccccgacacccgttttcggaatgggtgacgtgcggcaacgatatagcgcgaaaccaccccaaacatgacttttggacctaaagtagaggattgggaatgttcgttgcgaaaaacgaagaattggttccgatggcgaaaacgcgtgctttgtatgcaccccgacaccagttttgggaatgggtgacgtacggcaacgaaattgcgcgaaaccaccccaaacatgagttttggacctaaagtagtggattgggcatgctcgttgcaaaaatgaagaaatggttccagtggtgaaaacttgtgctttgtatgcacctcgacacctgttttcggaatgggtgacgtgcggcaacgaaattgcgtgaaaccaccccaaacatgagttttggacctaaagtagtggattgggcatgttcgttgcgaaaagcgaaaaatggttccggtggcaaaaactcgtgctttgtatgcaccccgacaaccgttttcggaatgggtgatgtgcagcaacgatatagcgcgaaaccaccccaaacatgagttttggacctaaagtagaggattgggaatgttcgttatgcaaaatgaagaattggttccggtggcaaaaacttgtgctttgtatgcaccccgacacccgttttgggaatgggtgacgtacgacaacgaaattgcgcgaaaccaccccaaacatgagttttggacctaaagtagtggattgtgcatgttcgttgcggaaaacgaagaaatggttccggtggcaaaaactaatgctttgtgtgcaccctgacacccgttttcggaatgggtgacgtgcggcaacgaaattgcgtgaaaccaccccaaacatgagttttggacctaaagtagaggattgagaatgttcgttgcgaaaaacgaagaa

SEQ ID NO: 432 - DNA, 6965 bp, Zea mays
  source: /note="Zea mays BAC clone full insert sequence contig bacm.pk024.f21.fis36"
tgtttagagctaacaagctatgcattccagctagctccgttcgtttgttgttgttacaggaagcacatggaggtggcttaatgggacattttggagcaaagaaaacggaggacatacttgctggtcatttcttttggcccaagatgagaagagatgtggtgagattgattgctcgttgcacgacatgtcaaaaggcgaagtcacggttaaatccacacggtttgtatttgcctctacctgttcctagtgctccttgggaagatatttctatggattttgtgctgggattgcctaggactaggaagggacgtgatagtgtgtttgtggttgttgatagattttctaagatggcacatttcataccatgtcataaaactgacgatgctactcatattgctgatttgttctttcgtgaaattgttcgcttgcatggtgtgcccaacacaatcgtttctgatcgtgatgctaaatttcttagtcatttttggaggactttgtggacaaaattggggactaagcttttattttctactacatgtcatcctcaaactgatggtcaaactgaaagtgtgaatagactttgtctactatgttaagggcagttctaaagaagaatattaagatgtgggaggactgtttgcctcatgttgaatttgcttataatcgatcattgcattctactacaaagatgtgcccatttcagattgtatatggtttgttgcctcgtgctcctattgatttaatgcctttgccatcttctgaaaaactaaattttgatgctactaggcgtgctgaattgatgttaaaactgcatgaaactactaaagaaaacatagagcgtatgaatgctagatataagtttgctagtgataaaggtagaaaggaaataaattttgaacctagagatttagtttggttgcatttgagaaaggaaaggtttcctgaattgcgaaaatctaagttgttgcctcgagccgatggaccgtttaaagtgctagagaaaattaacgacaatgcatataggctagatctgcctgcagactttggggttagccccacatttaacattgcagatttaaagccctacttgggagaggaagttgagcttgagtcgaggacgactcaaatgcaagaaggggagaatgatgaagacatccacactactgatgcatctataccaatacaagtaccaatttctggtcccattactcgcgctcgtgctcgtcaactcaaccatcaggtgattacactcttgagtttatgtccatcatatttagaccatggagacccgtgcactcttgttttgcttaggaatcagggagaagaccgaaagggaaaaggatttgaacatgctggattcggactgcagaagaacaccaacttgtgacggtcaccacggtcagatgcgggctcggattggaatgttcaagcacaacatggaaagcttatcaagtctactttcatatggatccggaattatagtcatatctgttctgaggccgccatcatcattgttttcttaccgagacatttcctgccttttctgcccatggtgctgcgtcaccctattttggcccaatgggtcgtgtatcaagttaggtccattagggacgcatcctagggttgcagcacgacaccaatacccttgtggtcgtcctcccatgtttataaaccccctagccgccaccaagaacagcgggtttttgtttagatcaagtttagctctcgctacttgcttgtaagcgcgcgtgctagttcagccgcccgtcttcttgtcttcggaaccccaccatattggagtttgattttgaaacctacatttagatctggtaattcagtacttgttctacttgttcttgctagttcttcgattgcttgcaggacgagtgccctagtggccagggtgtcacgctccacaagatcgtgacagccataggaggtggtgtatcggttgctaaggcgcagcgtctttggaaggctgtagtcgggccgtgaacgtcgtctcctcccccaatcgagttattccacaccctctcatcgaaagatcgggcaatcacccaacgggtgcacatcacgtcacacatttccaaaacgggtgtcggggtgcataccggaaccaattcttcttttttcgcaacgaacatgcccaatcctctactttaggtccaaaactcatgtttggggtggtttcgcgctatatcattgccgcacgtcacccattccgaaaacgggtgtcgggtgcatacaaagcatgagttttcgccaccgaaaccattttctttgttattcgcaacgaacatgcccaatccagtactttatgtccaaaactcatgtgtggggtggtttcgcgcaatttcgttgtcgtacgtcacccatttccaaaacgggtgtcggggtgcatacaaagcacgagtttttgccaccggaaccattttacgcttttcgcaacgaacatgcccaatccactactttaggtccaaaactcatgtttggggtggtttcgcgtaatttcgttgccgcacgtcacccattccgaaaacgggtgttggggtgcatacaaagcacgagttttcgccaccggaaccatttcttcgttttttgcaacgaacatgcccaatccactactttaggtccaaaactcatgtttggggtggttccgcgcaatttcgttgccgcacgtcacacatttccaaaacgggtgtcggggtgcatacaaagcacgagtttttgctaccggaaccaattcttttttcgcaacgaacatgcccaatcctctactttaggtccaaaactcatgtttggggtggtttcgcgctatatcattgccgcacgtcacccattccggaaacgggtgtcgggtgcatacaaagcatgagttttcgctaccggaaccatttctttgttattcgcaatgaacatgcccaatccactactttatgtccaaaactcatgtgtggggtggtttcgcgcaatttcgttgtcgtacgtcacccatttccaaaacgggtgtcggtgtgcatacaaagcacgagtttttgctaccggaaccaattcttttttcgcaacgaacatgcccaatcttctactttaggtccaaaactcatgtttggggtggtttcgcgctatatcattgccgcacgtcacccattccggaaacgggtgtcgggtgcatacgaagcatgagttttcgctaccggaaccatttctttgttattcgcaatgaacatgcccaatccactactttatgtccaaaactcatgtgtggggtggtttcgtgcaatttcgttgtcgtacgtcacccatttccaaaacgggtgtcggtgtgcatacaaagcacgagtttttgccaccggaaccaattcttcgtttttcgcaacgaacatgcccaatcttctactttaggtccaaaactcatgtttggggttgtttcgcgctatatcattgccgcacgtcacccattccgaaaacgggtgtcggggtgcatacaaagcacgagttttttccaccggaaccatttcttcgtttttcgcaacgaacatgcccaattcactagtttagatccaaaacttatgtttggggtgctttcgcgcaatttcgttgccgcacgtcacccattccgaaaacaggtgtcgggggtgcatacaaagcacgatttttcgccaccgaaaccatttcttctatttttgcaacaagcatgcccaatccactacttttggtccacaactcatgtttggagtggtttcgcgcaatttcgttgccgcacgtcacccatttccaaaacgggtgtcggggtgcatacaaagcacgagtttttgctaccggaaccaattcttctttttttgcaacgaacatgcccaatcctctactttaggtccaaaactcatgtttggggtggtttcgcgctatatcgttgctgcacgtcacccattccgaaaacggttgtcggggtgcatacaaagcacgagtttttgccaccggaaccatttttcgcttttcgcaacgaacatgcccaatccactactttaggtccaaaagtcatgtttggggtggtttcgcgcaatttcgttgccgcgcgtcacccattccgaaaacgggtgttggggtgcatacaaagcacgagttttcgccaccggaaccatttcttcgttttttgcaacgaacatgcccaatccactactttaggtccaaaactcatgtttggggtggttccgtgcaatttcgttgccgcacgtcacacatttccaaaacgggtgtcggggtgcatacaaagcacgagtttttgctaccggaaccaattcttcctttttcggaacgaacatgccaaatcctctactttaggtccaaaactcatgtttggggtggtttcgcgctatatcattgccgcacgtcacccattccgaaaacgggtgtcgggtgcatacaaagcatgagtttttgccaccggaaccatttctttgtttttcgcaacgaacatgcccaatccagtactttaggtccaaaactcatgtttggggttgtttcgcgctatatcattgccgcacgtcacccattcccaaaacgggtgtcggggtgcatacaaagcacgagtttttttccaccggaaccatttcttcgtttttcgcaacgaacatgcccaatccactagtttagatccaaaacttatgtttggggtgctttcgcgcaatttcgttgccgcacatcacccattccgaaaataggtgtcggggtgcatacaaagcacgagttttcgccaccggaaccatttcttcgatttttgcaacgagcatgcccaatccactactttaggtccacaactcatgtttggagtggtttcacgcaatttcgttgccgtacgtcacccattcccaaaacgagtgtcggggtgcatacaaagcacgagtttttgccaccggaaccaattcttcgtttttcgcaacgaacattcccaatcctctactttaggtccaaaactcatgtttggggtggtttcgcgctatatcgttgctgcacgtcacccattccgaaaacggttgtcggggtgcataaagcacgagtttttgccaccggaaccatttcttcgtttttcgcaacgaacatgcccaatgcactactttaggtccaaaactcatgtttggggtggtttcgcgcaatttcgttgccgcacgtcacccattccgaaaacgggtgttggggtgcatacaaagcacgagttttcgccaccggaaccatttcttcgttttttgcaacgaacatgcccaatccactactttaggtccaaaactcatgtttggggtggttccgcgcaatttcgttgccgcacgtcatgatgaagacatccacactactgatgcatctataccaatacaagtaccaatttctggtcccattactcgcgctcgtgctcgtcaactcaaccatcaggtgattacactcttgagttcatgtccatcatatttagaccatggagacccgtgcactcttgttttgcttaggaatcagggagaagaccgaaagggaaaaggatttgaacatgctggattcggactgcagaagaacaccaacttgtgacggtcaccacggtcagatgcgggctcggattggaatgttcaagcacaacatggaaagcttatcaagtctactttcatatggatccggaattatagtcatatctgttctgaggccgccgtaatcattgttttcttaccgagacatttcctgccttttctgcccatggtgctgcgtcaccctattttggcccaatgggtcgtgtatcaagttaggtccattagggacgcatcctagggttgcagcacgaccccaatacccttgtggtcgtcctcccatgtttataaaccccctagcctgatgcggacatcaacaccaacacgagcacatctacaccagcagcaccttctccagcccaggcgccaccccttccacctgggccagtgactcgggcccgtgcaagagaattgaactacatcatgttgttaaagaacgaaggcccagaagaatagacgaccaggccaattgcggcccataatggacgacctagggttggccgccccctaggggctgcgccccctctctatttattcaggagctgcgcctcctttattttccgagttttgttttacgttagccttagctactctcgaacacgcgcaaatctgcgctgtcttcgtgtattcagaactccaccctcgagtaatagattagattgctcgcctctttttcttgttcgttcttcgattgcgcataggaaacgatcttcgtgatcaggccgatctcgcaacagcaaggtcggtaaccacagggagttggttcagcgattgcattggcgcctcgggcttgctcgtcgtagtcggatcgcaagggtcatcttctgctaaatcggaattatctctactcgccgaaagatcgggcacctcagcttcatcattggtatcagatttccaggttgatcggtgagtttatcgagcgttttttttccctacagtccacaaaaccacataaaaattcaggttagatcttatcccagcacccttttgagcctcgcactttctttcaataatctgcattgttgaatttgtgtgctttcgcgtttccttgttgctggttgcattgtgttcttccaccattcaaatcctagcgccgccaccatctcccgtttgatcacgccacaaaccgagtcaacattgtctccttgtttttctccttcggttacgtcaaaaagaaaacagaaaaaacaaaccgaggcaacggccgtttccttgattttctccttcggttacgaaaaaaaaacagaaaaaaaaacaaaccgagtcaacgaccgcttccttgtttttctcctacggttgtttcattccggtagtttttaaaacataacttgaggtaccttccgtaaaccgggcataacttttcgctcgggtgtccaaaaaatctgaaatttttacaggagcttg

SEQ ID NO: 433 - DNA, 3525 bp, Zea mays
  source: /note="Zea mays BAC clone full insert sequence contig bacm.pk024.f21.fis37"
ttgcaacgagcatgcccaatccactacttttggtccacaactcatgtttggagtggtttcgcgcaatttcgttgccgtacgtcacccattcccaaaacgggtgtcggggtgcatacaaagcacgagtttttgccaccggaaccaattcttcgtttttcgcaacgaacattcccaatcctctactttaggtccaaaactcatgtttggggtggtttcgcgctatatcgttgctgcacgtcacccattccgaaaacggttgtcggggtgcataaagcacgagtttttgccaccggaaccatttcttcgtttttcgcaacgaacatgcccaatccactactttaggtccaaaactcatgtttggggtggtttcgcgcaatttcgttgccgcacgtcacccattccgaaaacgggtgttggggtgcatacaaagcacgagttttcgccaccggaaccatttcttcgttttttgcaacgaacatgcccaatccactactttaggtccaaaactcatgtttggggtggttccgcgcaatttcgttgccgcacgtcacacatttccaaaacgggtgtcggggtgcatacaaagcacgagtttttgctaccggaaccaattcttttttcgcaacgaacatgcccaatcctctactttaggtccaaaactcatgtttggggtggtttcgcgctatatcattgccgcacgtcacccattccggaaacgggtgtcgggtgcatacaaagcatgagttttcgctaccggaaccatttctttgttattttcatgaacatgcccaatccactacttatgtccaaaactcatgtgtggggtggtttcgcgcaatttcgttgtcgtacgtcacccatttccaaaacgggtgtcggtgtgcatacgaagcacgagtttttgccaccggaaccaattcttcgtttttcgcaacgaacatgcccaatcttctactttaggtccaaaactcatgtttggggttgtttcgcgctatatcattgccgcacgtcacccattccgaaaacgggtgtcggggtgcatacaaagcacgagttttttccaccggaaccatttcttcgtttttcgcaacgaacatgcccaatccactagtttagatccaaaacttatgtttggggtgctttcgcgcaatttcgttgccgcaggtcacccattccgaaaacaggtgtcggggtgcatacaaagcacgagttttcgccaccggaaccatttcttcgatttttgcaacgagcatgcccaatccactactttaggtccacaactcatgtttggagtggtttcacgcaatttcgttgccgtacgtcacccattcccaaaacgggtgtcggggtgcatacaaagcacgagtttttgccaccggaaccaattcttcgtttttcgcaacgaacattcccaatcctctactttaggtccaaaactcatgtttggggtggtttcgcgctatatcgttgctgcacgtcacccattccgaaaacggttgtcggggtgcataaagcacgagtttttgccaccggaaccatttcttcgtttttcgcaacgaacatgcccaatccactactttaggtccaaaactcatgtttagggtggtttcgcgcaatttcgttgccgcacgtcacccattccgaaaacgggtgttggggtgcatacaaagcacgagttttcgccaccggaaccatttcttcgttttttgcaacgaacatgcccaatccactactttaggtccaaaactcatgtttggggtggttccgcgcaatttcgttgccgcacgtcacacatttccaaaacgggtgtcggggtgcatacaaagcacgagtttttgctaccggaaccaattcttcttttttcgcaacgaacatgcccaatcctctactttaggtccaaaactcatgtttggggtggtttcgcgctatatcattgcagcacgtcacccattccgaaaacgggtgtcgggtgcatacaaagcatgagttttcgccaccggaaccatttctttgttattcgcaacgaacatgcccaatccagtactttatgtccaaaactcatgtgtggggtggtttcgcgcaatttcgttgtcgtacgtcacccatttccaaaacgtgtgtcagggtgcatacaaagcacgagtttttgccaccggaaccaattcttcattttttgcaacgaacatgcccaatcctctactttaggtccaaaactcatgtttggggtggtttcgcgctatatcattgccgcacgtcacccattccggaaacgggtgtcgagtgcatacaaagcatgagttttcgccaccggaaccatttctttgttattcgcaatgaacatgcccaatccactactttatgtccaaaactcatgtgtggggtggtttcgcgcaatttcattgtcgtacgtcacccatttccaaaacgggtgtcggggtgcatacaaagcacgagtttttgccaccggaaccaattcttcgtttttcgcaacgaacatgtccaatcctctactttaggtccaaaactcatgtttggggttgtttcgcgctatatcattgccgcacgtcacccattccgaaaacgggtgtcggggtgcatacaaagcacgagtttttccaccggaaccatttcttcgttttcgcaacgaacatgcccaatccactagtttagatccaaaacttatgtttggggtgctttcgcgcaattttgttgccgcacgtcacccattccgaaaacaggtgtcggggtgcatacaaagcacgagttttcgccaccggaaccatttcttcgatttttgcaacgagcatgcccaatccactactttaggtccacaactcatgtttggtgtggtttcgcgcaatttcgttgccgtacgtcacccattcccaaaacgggtgtcggggtgcatacaaagcacgagtttttgccaccggaaccaattcttcgtttttcgcaacgaacattcccaatcctctactttaggtccaaaactcatgtttggggtggtttcgcgctatatcgttgctgcacgtcacccattccgaaaacggttgtcggggtgcataaagcacgagtttttgccaccggaaccatttcttcgtttttcgcaacgaacatgcccaatccactactttaggtccaaaactcatgtttagggtggtttcgcgcaatttcgttgccgcacgtcacccattccgaaaacgggtgttggggtgcatacaaagcacgagttttcgccaccggaaccatttcttcgttttttgcaacgaacatgcccaatccactactttaggtccaaaactcatgtttggggtggttccgcgcaatttcgttgccgcacgtcacacatttccaaaacgggtgtcggggtgcatacaaagcacgagtttttgctaccggaaccaattcttcttttttcgcaacgaacatgcccaatcctctactttaggtccaaaactcatgtttggggtggtttcgcgctatatcattgccgcacgtcacccattccgaaaacggttgtcgggg

SEQ ID NO: 434 - DNA, 11114 bp, Zea mays
  source: /note="Zea mays BAC clone full insert sequence contig bacm.pk024.f21.fis38"
cgatgattgcggagcgctcagaacgaattttgagataaggtcagatccgttggaaagaagataagataagctttccagattgtatttaaacttccaaatcggatatgatatgtatccgtggtggcaaaaacgaaccagagatgtttttggtgatggtggatctcgtggtgaccaaaacgtggtagaactcaaaactctaaaggaataaactaagaccagcaactcgacacaaccgatgcaaccaaaaactcaacaagccctaactaagtagtactagtaaatgctcaatggtttataggattgcggtaaaactaatctactatttttttggctttttctggactataggagataagaaaacagcgaagaaaagtaaatctctcaccgataaaccttgctctgattaccaactgatgtgcacccgttgggtgattgcccgatctttcgatgagagggtgtggaataactcgattgggggaggagacgacgttcacggcccgactacagccttccaaagacgctgcgccttagcaaccgatacaccacctcctatggctgtcacgatcttgtggagcgtgacaccctggccactagggcactcgtcctgcaagcaatcgaagaactagcaagaacaagtagaacaagtactgaattaccagatctaaatgtaggtttaaaaatcaaactccaatatggtggggttccgaagacaagaagacgggcggctgaactagcacgcgcgcttgcaagcaagtagcgagagctaaacttgatctaaacaaaacccgctgttcttggtggcggctagggggtttataaacatgggaggacgaccacaagggtattggggtcgtgctgcaaccctaggatgcgtccctaatggacctaacttgatacacgacccattgggccaaaatagggtgacacagcaccatgggcagaaaaggcaggaaatgtctcggtaagaaaacaatgattacggcggcctcagaacagatatgactataattccggatccatatgaaagtagacttgataagctttcgatgttgtgcttgaacattccaatccgagcccgcatctgaccgtggtgaccgtcacaagttggtgttcttctgcagtccgaatccagcatgttcaaatccttttctctttcggtcttctccctgattcctaagcaaaacaagagtgcacgggtctccatggtctaaatatgatggacatgaactcaagagtgtaatcacctgatggttgagttgacgagcacgagcgcgagtaatgggaccagaaattggtacttgtattggtatagatgcatcagtagtgtggatgtcttcatcattaggtccaaaacttatgtttggggtggtttcgcgcaatttcgttgccgcacgtcacccattccgaaaacgggtgttggggtgcatacaaagcacgagttttcgccaccggaaccatttcttattttttgcaacgaacatgcccaatccactactttaggtccaaaactcatgtttggggtgattccgtgcaatttcgttgccgcacgtcacacatttccaaaacgggtgtcggggtgcatacaaagcacgagtttttgctaccggaaccaattcttcctttttcgcaacgaacatgcccaatcctctactttaggtccaaaactcatgtttggggtggtttcgcgccatatcattgccgcacgtcacccatttcgaaaacgggtgtcgggtgcatacaaagcatgagttttcgccaacggaaccatttctttgttattcgcaacgaacatgcccaatccagcactttatgtccaaaactcatgtgtgggggtggtttcgcgcaatttcgttgtcgtacgtcacccatttccaaaacgggtgtcggggtgcatacaaagcacgagtttttgccaccggaaccatttcttgcttttcgcaacgaacatgcccaatccactactttagttccaaaactcatgtttggggtggtttcgcgcaatttcgttgccgcacgtcacccattccgaaaacgggtgttggggtgcatacaaagcacgagttttcgccaccggaaccatttcttcgtttttagcaacgaacatgcccaatccactactttaggtccaaaactcatgtttggggtggttccgcgcaatttcgttgccgcacgtcacacatttccaaaacgggtgtcggggtgcatacaaagcacgagtttttgctaccggaaccaattcttctttttttgcaacaaacatgcccaatcctctattttaggtccaaaactcatgtttggggtggtttcgcgctatatcattgctgcacgtcacccattccgaaaacgggtgtcgggtgcatacaaagcatgagttttcgccaccggaaccatttctttgttattcgcaacgaacatgcccaatccagtactttatgtccaaaactcatgtgtggggtggtttcgcgcaatttcgttgtcgtacgtcacccatttccaaaacgggtgtcggggtgcatacaaagcacgagtttttgccaccggaaccatttttcgcttttcgcaacgaacatgcccaatccactactttaggtccaaaactcatgtttggggtggtttcgcgtaatttcgttgccgcacgtcacccattccgaaaatgggtgttggggtgcatacaaagcatgagttttcgccaccggaaccatttcttcgttttttgcaacgaacatgcccaatccactactttaggtccaaaactcatgtttggggtggttccgcgcaatttcgttgccgcacgtcacacatttccaaaacgggtgtcggggtgcatacaaagcacgagtttttgctaccggaaccaattcttctttttttgcaacgaacatgcccaatcctctactttaggtccaaaactcatgtttggggtggtttcgcgctatatcgttgccgcacgtcacccattccgaaaacgggtgtcggggtgcatacaaagcacgagtttttgccaccggaaccatttttcacttttcgcaacgaacatgcccaatccactactttaggtccaaaactcatgtttggggtggtttcgcgcaacttcgttgccgcacgtcacccattccgaaaacgggtgttggggtgcatacaaagcacgagttttcgccaccggaaccatttcttcgttttttgcaacgaacatgcccaatccactactttaggtccaaaactcatgtttggggtggttccgcgcaatttcgttgccgcacgtcacacatttccaaaacgggtgtcggggtgcatacaaagcacgagtttttgctaccggaaccaattcttctttttcgcaacgaacatgcccaatcctctactttaggtccaaaactcatgttggggtggtttcgcgttatatcattgctgcacgtcacccattccgaaaacgggtgtcgggtgcatacaaagcatgagttttcgccaccggaaccatttctttgttattcgcaacgaacatgcccaatccagtactttatgtccaaaactcatgtgtggggtggtttcgcgcaatttcgttgtcgtacgtcacccatttccaaaacgggtgtcggtgtgcatacaaagcacgagtttttgccaccggaaccaattcttcgtttttcgcaacgaacatgaccaatcttctactttaggtccaaaactcatgtttggggttgtttcgcgctatatcattgccgcacgtcacccattccgaaaacgggtgtcggatacaaagcacgagttttttccaccggaaccatttcttcgtttttcgcaacgaacatgcccaatccactagtttagatccaaaacttatgtttggggtgctttcgcgcaatttcgttgccgcacgtcacccattccgaaaacaggtgtcggggtgcatacaaagcacgagttttcgccaccggaaccatttcttcgatttttgcaacgagcatgcccaatccactactttaggtccacaactcatgtttggagtggtttcgcgcaatttcgttgccgtacgtcacccattcccaaaacgggtgtcggggtgcatacaaagcacgagtttttgccaccggaaccaattcttcgtttttcgcaacgaacattcccaatcctctactttaggtccaaaactcatgtttggggtggtttcgcgctatatcgttgctgcacgtcacccattccgaaaacggttgtcggggtgcatacaaagcacgatttttgccaccggaaccatttcttcgtttttcgcaacgaacattctcaatcctctactttaggtccaaaactcatgtttggggtggtttcgcgctatatcgttgccgcccgtcacccattccgaaaacgggtgtcaaggtgcatacaatgcacgagtttttgccaccggaaccatttcttcgtttttcgcaacgaacatgcccaatccactactttaggtccaaaactcatatttggggtggtttcgcgcaatttcgtagccgcacgtcacccattccgaaaatgggtgtcgggtgcatacaaagtatgagttttcgccgccggaaccaattcttcgtttttcgctacgaacatgcccagtccactactttaggtaaaaactcatatttggggtggtttcgcgcaatttcgttgcgagacgtcacacattccaaaaacgggtgtcggggtgcatacaaagcacgactttttgccaccggaaccatttcttcgtttttcgcaacgaacattctcaatcctctactttaggtccaaaactcatgtttggggtggtttcacgcaatttcgttgccgcacgtcacccattccgaaaacgggtgtcagggtgcacacaaagcattagtttttgccaccggaaccatttcttcgttttccgcaacgaacatgcacaatccactactttaggtccaaaactcatgtttggggtggtttcgcgcaatttcgttgtcgtacgtcacccattcccaaaacgggtgtcggggtgcatacaaagcacaagtttttgccaccggaaccaattcttcattttgcataacgaacattcccaatcctctactttaggtccaaaactcatgtttggggtggtttcgcgctatatcgttgctgcacatcacccattccgaaaacggttgtcggggtgcatacaaagcacgagtttttgccaccggaaccatttttcgcttttcgcaacgaacatgcccaatccactactttaggtccaaaactcatgtttggggtggtttcgcgcaatttcgttgccgcacgtcacccattccgaaaacgggtgttggggtgcatacaaagcacgagttttcaccaccggaaccaattcttcatttttcataacaaacattcccaatcctctactttaggtccaaaactcatgtttggggtggtttcgcgctatatcgttgctgcacgtcacccattccgaaaacgggtgtcggggtgcatacaaagcacgagtttttgccaccggaaccatttttcgcttttttcaaagaacatgccccatcccctaccttatggcccaaaatcatgtctgggggtggtttcgtgcaatttcgttgccgcacgtcacccatttcgaaaaacgggtgttggggtgcatacaaagcacgagttttcgccaccggaaacatttctttgatttttgcaacgagcatgcccaatccactactttaggtccaaaactcatgtttggggtggtttcgcacaatttcgttgcagtacgtcacccattcccaaaacgggtgtcggggtgcatacaaagcacgagttttcgccaccggaaccaattcttcgtttttcgcaacgaacattcccaatcctctacttcaggtccaaaactcatgtttggggtggttccgtgcaatttcgttgccgcacgtcacacattccgaaaacgggtgtcgggtgcatacaaagcacgatttttcgccaccggaaccatttcttcgtttttgcaacgaacatgcccaatctactcctttaggtccaaaactcatgtttgggtggtttcgcgaaatttcgttgccgcacgtaacccattccgaaaacaggtgtcgggtgcatacaaagcatgagttttcgccaccggaaccatttctttgttattcgcaactaacatgcctaatccactactttatgtccaaaactcatgtgtggggtggtttcgcgcaatttcgttgtcgtacgtcacccatttccaaaacgggtgtcggggtgcatacaaagcacgagttttcgccactggaaccatttcttcgtttttcgcaacgaacatgcccaattctctactttaggtccaaaaatcatgtttggggttgtttcgcgctatatcattgccgcacgtcacccattccggaaacgggtgtcggggtgcatacaaagcacaagtttttgccaccggaaccatttcttcgttttttgcaacaaacatgcccaatccactactttaggtccaaaacttaagtttggggtggtttcgcgcaatttcgttgccgcacgtcacccattccgaaaacgggtgtcggggtgcatacaaagcacaagttttcaccaccggaaccatttcttcgttttttgcaatgagcattgatgtgcacccgttgggtgattgcccgatctttcgatgagagggtgtggaataactcgattgggggaggagacgacgttcacggcccgactacagccttccaaagacgctgcgccttagcaaccgatacaccacctcctatggctgtcacgatcttgtggagcgtgacaccctggccactagggcactcgtcctgcaagcaatcgaagaactagcaagaacaagtagaacaagtactgaattaccagatctaaatgtaggtttaaagatcaaactacaatatggtggggttccgaagacaagaagacgggcggctgaactagcacgcgcgcttgcaagcaagtagcgagagctaaacttgatctaaacaaaacccgctgttcttggtggcggctagggggtttataaacatgggaggacgaccacaagggtattggggtcgtgctgcaaccctaggatgcgtccctaatggacctaacttgatacacgacccattgggccaaaatagggtgacgcagcaccatgggcagaaaaggcaggaaatgtctcggtaagaaaacaatgattacggcggcctcagaacagatatgactataattccggatccatatgaaagtagacttgataagctttccatgttgtgcttgaacattccaatccgagcccgcatctgaccgtggtgaccgtcacaagttggtgttcttctgcagtccgaatccagcatgttcaaatccttttccctttcggtcttctccctgattcctaagcaaaacaagagtgcacgggtctccatggtctaaatatgatggacatgaactcaagagtgtaatcacctgatggttgagttgacgagcacgagcgcgagtaatgggaccagaaattggtacttgtattggtatagatgcatcagtagtgtggatgtcttcatcattctccccttcttgcatttgagtcgtcctcgactcaagctcaacttcctctcccaagtagggctttaaatctgcaatgttaaatgtggggctaaccccaaagtctgcaggcagatctagcctatatgcattgtcgttaattttctctagcactttaaacggtccatcggctcgaggcaacaatttagattttcgtaattcaggaaacctttcctttctcaaatgcaaccaaactaaatctccaggttcaaaatttatttcctttctacctttatcactagcaaacttatatctagcattcatacgctctatgttttctttagtagtttcgtgcagttttaacatcaattcagcacgcctagtagcatcaaaatttagtttttcagaagatggcaaaggcattaaatcaataggagcacgaggtaacaaaccatatacaatctgaaatgggcacatctttgtagtagaatgcaatgatcgattataagcaaattcaatatgaggcaaacagtcctcccacatcttaatattcttctttagaactgcccttaacatagtagacaaagttctattcacaacttcagtttgaccatcagtttgaggatgacatgtagtagaaaataaaagcttagtccccaattttgcccacaaagtcctccaaaaatgactaagaaatttagcatcacgatcagaaacgattgtgttgggcacaccatgcaagcgaacaatttcacgaaagaacaaatcagcaatatgagtagcatcgtcagttttatgacatggtatgaaatgtgccatcttagaaaatctatcaacaaccacaaacacactatcacgtcccttcctagtcctaggcaatcccagcacaaaatccatagaaatatcttcccaaggagcactaggaacgggtagaggcaaatacaaaccgtgtggatttaaccgtgacttcgccttttggcatgtcgtgcaacgagcaaccaatctcaccacatctcttctcatcttgggccaaaagaaatgaccagcaagtatgtcctccgttttctttgctccaaaatgtcccattaagccacctccatgtgcttcctgtaacaacaacaaacgaacggagctagctggaatgcatagcttgttagctctaaacacaaacccatcactaacgatatatttgttccatcctttcccatctttacaatgcagcaacacatctttaaaatcagcatcatgaacatattggtctttaatcgtctctaatccaaagattttgtagtcaagttgattcagcaaagtatatctcctagacaaagcgtcagcaatgatattctcttttcctttcttgtgcttaataacataaggaaacgattcgataaattcaacccacttagcatttctatggttcagttttccttgactacgaatatgtttcaaagattcatgatcagaatgaataacaaactctttgggccacaaataatgctgccatgtttctaatgttcgcacaagagcatataattccttatcataagtagaataatttacaacagacccactcaatttttcactaaaatatgcaacaggtttgccttcttgtaacaaaacaccacccaatccaattccactagcatcacattcaagctcaaaagtcttattaaaatcaggaagttggaggagaggtgcatgtgtcaacttatctttcagcacgttgaaagcgtgctcttgtactttgccccaactaaaatgcactcccttcttcgtaagctcattcaaaggtgcagcaatggtgctaaagtccttcacaaaacggcgatagaagccagcaagtcctaggaaactccgcacctgtgtgatagtctttggcataggccatccatgtatcgcttctaccttggcttgatcaacctcaattccctgtggagtcacaacataaccaagaaacgaaactcgatcggtgcaaaatgtgcacttctcaaggttaccaaataaacgtgcatctcgtaaagcattaaaaacagcacgcatgtgatcaacatgttcatccatagatttgctgtagatcaatatgtcatcaaagtatactaccacaaattttccaatgaaggcacgcaaaacctcgttcattaatctcatgaaagtgctaggtgcattagttaacccaaaaggcatgactaaccactcatacaatccgaacttagttttgaaagcagttttccattcatctcccaatttcatacgaatctggtggtacccactacgcaaatcaactttagaaaagacaatggcaccactcaattcatcaagcatatcatctaaacgtggaatagggtgtcgataacgtatcgtgatattattaatagccctacaatcaacacacatacgccatgttccatcttttttaggcactaaaataaccggaacagcacacggactaagagactcacgcacgtaacctttgtcgagtagttcttgcacttgtcgctgaatttcttttgtttcctctggatttgtcctatatggcgcacgattcggcaaagatgcaccaggaataagatcaatttggtgctcaatccctcgtataggtggcagcccctctggtatctcacttggaaatacatcagaatactcctgcaaaatgttagtaataacaggaggcaaagaatgttgcatatcttgaattgaaatcaaagcatccttgcataccaaggcgtaggcaacagtagtggaagcaaataattcattaacatcagtttttgttgcaagcaagcaatgtcctttcaattttatcccatctttgttattaccaacagctttaatattcttgttgttctcagttttagctttggtagctttagcaacatcatcacgcacaatagcctcaggggacatgggaagcaaaataattttcttatcatggtgtatgagagaatattgatttgatctaccatgatgcatacaatctgaatcaaattgccatggtctacctagcagaatattacaagcatccataggcacaacatcacagtcaacaacatcacaatatgaaccaatagcaaaattaattcgtaccaacttggttaccttgaccttaccactattgttgagccattgaatgtgatatggatgtgggtgcggtttggtcgtaagtgcaagcttctccaccatgtcgctgctagccaagttgttgcagctacctccatcaatgatcaaacgacatgaacgctccttaatgacacactttgtttgaaacaatgtatgtcgctgattctgctctgccttctccatttgtgcactaagcacacgctgtacaatgaggctctcataatgcactgcatcatctgcaccaatctgttcttcgggtggttccttagtgcctgcatcatcagccgcaagcaaagcaagtgtagcttcatccaaatcactagcagaagaatacccaccatcgtcttttaccaccaaaacacgctgattaggacaatcacgctgcacgtgtccatagcccttgcatcgataacacagaacatctcttgttctacccgtggaggctactgaagaggcactacctgctggtttctgggcag

SEQ ID NO: 435 - DNA, 10229 bp, Zea mays
  VARIATION (4047)..(4075): /replace="c" or "g" or "t"
  misc_feature (4047)..(4075): /note="Nucleotides given in the sequence have no preference with respect to those in the annotations for said positions"
  source: /note="Zea mays BAC clone full insert sequence contig bacm.pk024.f21.fis39"
gttgcaaaaatcgaagaaatggttccggtggtgaaaactcgtgctttgtatgcaccccgacacctgttttcggaatgggtgacgtgcggcaacaaaattgcgcgaaagcaccccaaacataagttttggatctaaactagtggattgggcatgttcgttgcgaaaacgaagaaatggttccggtggaaaaaaactcgtgctttgtatgcaccccgacacccgttttcggaatgggtgacgtgcggcaatgatatagcgcgaaacaaccccaaacatgagttttggacctaaagtagaggattggacatgttcgttgcgaaaaacgaagaattggttccggtggcaaaaactcgtgctttgtatgcaccccgacacccgttttggaaatgggtgacgtacgacaatgaaattgcgcgaaaccaccccacacatgagttttggacataaagtagtggattgggcatgttcattgcgaataacaaagaaatggttccggtggcgaaaactcatgctttgtatgcactcgacacccgtttccggaatgggtgacgtgcggcaatgatatagcgcgaaaccaccccaaacatgagttttggacctaaagtagaggattgggcatgttcgttgcaaaaaatgaagaattggttccggtggcaaaaactcgtgctttgtatgcaccccgacacacgttttggaaatgggtgacgtacgacaacgaaattgcgcgaaaccaccccacacatgagttttggacataaagtactggattgggcatgttcgttgcgaataacaaagaaatggttccggtggcgaaaactcatgctttgtatgcaccccgacacccgtttcgaatgggtgacgtgcggcacgaaaattgcgcgaaagcaccccaaacataagttttgatctaaagtagtggattgggcatgttcgtgcgaaaaaacgaagaaatggttccggtggcaaaaactcgtgctttgtatgcaccccgacacccgttttcggaatgggtgacgtgcggcaatgatatagcgcgaaacaaccccaaacatgagttttggacctaaagtagaggattgggcatgttcgttgcgaaaaacgaagaattggttccggtggcaaaaactcgtgctttgtatgcaccccgacacccgttttggaaatgggtgacgtacgacaacgaaattgcgcgaaaccaccccacacatgagttttggacataaagtagtggattgggcatgttcattgcgaataacaaagaaatggttccggtggcaaaaactcatgctttgtatgcacccgacacccgttttcggaatgggtgacgtgcggcaatgatatagcgcgaaaccaccccaaacatgagttttggacctaaagtagaggattgggcatgttcgttgcgaaaaaagaagaattggttctggtagcaaaaactcgtgctttgtatgcaccccgaaacccgttttggaaatgtgtgacgtgcggcaacgaaatagcgcggaaccacccaaaacaagagttttggacctaaagtagtggattgggcatgttcgttgcaaaaaaacgaagaaatggttccggtggcgaaaactcgtgctttgtatgcaccccaacacccgttttcggaatgggtgacgtgcggcaacgaaattgcacgaaaccaccccaaacatgagttttggacctaaggtagtggattgggcatgttcgttgcgaaaacgaagaaatttttccggtggcaaaaactcgtgctttatgcaccccgacaaccgttttcggaatgggtgacgtgcagcaacgatatagcgcgaaaccaccccaaacatgagttttggacctaaagtagaggattgggaatgttcgttgcgaaaaacgaagaattggttccggtggcaaaaactcgtgctttgtatgcaccccgacacccgttttgggaatgggtgacgtacggcaacgaaattgcgtgaaaccactccaaacatgagttgtggacctaaagtagtggattgggcatgctcgttgcaaaaatcgaagaaatggttccggtggcgaaaactcgtgctttgtatgcacccccgacacccgttttcggaatgggtgacctgcggcaacgaaattgcgcgaaagcaccccaaacataagttttggatctaaactagtggattgggcatgttcgttgcgaaaaacgaagaaatggttccggtggaaaaaactcgtgctttgtatgcaccccgacacccgttttcggaatgggtgacgtgcggcaatgatatagcgcgaaacaaccccaaacatgagttttggacctaaagtagaagattgggcatgttcgttgcgaaaaacgaagaattggttccggtggcaaaaactcgtgcttcgtatgcacaccgacacccgttttggaaatgggtgacgtacgacaacgaaattgcgcgaaaccaccccacacatgagttttggacataaagtagtggattgggcatgttcattgcgaataacaaagaaatggttccggtagcgaaaactcatgctttgtatgcacccgacacccgtttccggaatgggtgacgtgcggcaatgatatagcgcgaaaccaccccaaacatgagttttggacctaaagtaaaggattgggcatgttcgttgcgaaaaaagaattggttccggtggcaaaaactcgtgctttgtatgcaccccgacacacgttttggaaatgggtgacgtacgacaacgaaattgcgcgaaaccaccccaaacatgagttttggacctaaagtagtggattgggcatgttcgttgcgaaaaacgaagaaatggttccggtggcaaaaactcgtgctttatgcaccccgacaaccgttttcggaatgggtgacgtgcagcaacgatatagcgcgaaaccaccccaaacatgagttttggacctaaagtagaggattgggaatgttcgttgcgaaaaacgaagaattggttccggtggcaaaaactcgtgctttgtatgcaccccgacacccgttttgggaatgggtgacgtacggcaacgaaattgcgcgaaaccactccaaacatgagttgtggacctaaagtagtggattgggcatgctcgttgcaaaaatcgaagaaatggttccggtggcgaaaactcgtgctttgtatgcaccccgacacctgttttcggaatgggtgacctgcggcaacgaaattgcgcgaaagcaccccaaacataagttttggatctaaactagtggattgggcatgttcgttgcgaaaaacgaagaaatggttccggtggaaaaaactcgtgctttgtatgcaccccgacacccgttttcggaatgggtgacgtgcggcaatgatatagcgcgaaacaaccccaaacatgagttttggacctaaagtagaggattgggcatgttcgttgcgaaaaacgaagaattggttccggtggcaaaaactcgtgctttgtatgcaccccgacacccgttttggaaatgggtgatgtacgacaacgaaattgcgcgaaaccaccccacacatgagttttggacataaagtagtggattgggcatgttcgttgcggaaaacgaagatatggttccggtggcgaaaactcatgctttgtatgcacccgacagtcgtttttggaatgggtgacgtgcgacaacgaaattgcgcgaaaccaccccaaacatgagtttttgacctaaagtagtggattgggcatgttcgttgagaaaaacgaagaaatggtttcggtggcaaaaagtcgtgctttgtatgcaccccgacacccgttttcggaatgtgtgacgtccggcaacgaaattgcgcgaaaccaccccaaatatgagtttttacctaaagtagtggattgggcatgttcgtagcgaaaaacgaagaattggttccggcggcgaaaactcgtactttgtatgcacccgacacccgttttcggaatggtgacgtgcggcaacgaaattgcacgaaaccaccccaaacattagttttggacctaaagtagtggattgggcatgttcgttacgaaaaaaaaaaaaaaaaaaaaaaaaaaaaaaactcatgctcacccgttttgtatggaccccgacacccgttttgtgaatgggtgacgtacgacaacgaaattgtgcgaaaccaccccaaacatgagttttggacctaaagtagtggattgggcatgttcgttgcgaaaaacgaagaaatggttccggtggcgaaaactcatgctcacccgttttcggaatgggtcacgtgcggcaacgaaattgcgtgaaaccaccccaaacatgagttttggacctaaagtagtggattgggcatgctcgttgcaaaaaacgaagaaatggttccggtggcaaaaactcgtgctttctatgcaccccgacacccgttttcggaatgggtgacgtgcggcaacaaaattgcgcgaaacgaccccaaacataagttttggacctaaagtagtggattgggcatgttcgttgcgaaaaacgaagaaatggttccggtggcaaaactcgtgctttgtatgcaccccgacacccgttttcggaatgggtgacgtgcgacaatgatatagcgcgaaacaaccccaaacatgagttttggtcctaaagtagatgattgggcatgttcgttgcgaaaaacgaagaattggttccggtggcaaaaactcgtgctttgtatgcaccccgacacccgttttggaaatgtgtgacgtacgacaacgaaattgcgcgaaaccaccccacacatgagttttggacctaaagtagtggattgggcatgttcgttgcgaataacaaagaaattggttccggtggcaaaaactcatgctttgtatgcacccgacacctgttttcggaatgggtgacgtgcggcaacgaaatttcgcgaaacaatcccaaacatgagttttggacctaaagtagtgtattgggcatgttcgttgcaaaaaacgaagaaatggttccggttgcaaaaactcgtgctttgtatgcaccccgacacccgttttcggaatgggtgacgtgcggcaacgatatagcgcgaaaccaccccaaacatgagttttggacctgaaatagaggattgggaatgttcgttgcgaaaaacgaagaattggttccggtggcgaaaactcgtgctttgtatgcaccctgacacccgttttcggaatgggtgacgtgcggcaatgatatagcgcgaaacaaccccaaacatgagttttggacctaaagaagacgattggacatgttcgttgcaaaaatcgaagaaatggttccggtggcgaaaactcgtgctttgtatgcacccaacacctgttttcggaatgggtgacgtgcggcaacgaaattgcgcgaaagcaccccaaacataagttttggacctaaagtagtggattgggcatgttcgttgcgaataacaaagaaatggttccggtggcaaaaactcgtgctttgtatgcaccccgacacccgttttcggaatgggtgacgtgcggcaatgatatagcgcgaaacaaccccaaacatgagttttggacctaaagtagaggattgggcatgttcgttgcaaaaaatgaagaattggttccggtggcaaaaactcgtgctttgtatgcaccccgacacccgttttggaaatgggtgacgtacgacaacgaaattgcgcgaaaccaccccacacatgagttttggacataaagtactggattgggcatgttcgttgcgaataacaaagaaatggttccggtggcgaaaactcatgctttgtatgcacccgacacccgttttcggaatgggtgacgtgcggcaatgatatagcgcgaaaccaccccaaacatgagttttggacctaaagtagaggattgggcatgttcgttgcgaaaaaagaattggttccggtagcaaaaactcgtgctttgtatgcaccccgacacccgttttggaaatgtgtgacgtgcggcaacgaaattgcgcggaaccaccccaaacatgagttttggacctaaagtagtggattgggcatgttcgttgcaaaaaacgaagaaatggttccggtggcgaaaactcgtgctttgtatgcaccccaacacccgttttcggaatgggtgacgtgcggcaacgaaattgcgcgaaaccaccccaaacatgagttttggacctaaagtagtggattgggcatgttcgttgcgaaaaacgaagaaatggttccggtggcaaaaactcgtgctttatgcaccccgacaaccgttttcggaatgggtgacgtgcagcaacgatatagcgcgaaaccaccccaaacatgagttttggacctaaagtagaggattgggaatgttcgttgcgaaaaacgaagaattggttccggtggcaaaaactcgtgctttgtatgcaccccgacacccgttttgggaatgggtgacgtacggcaacgaaattgcgtgaaaccactccaaacatgagttgtggacctaaagtagtggattgggcatgctcgttgcaaaaatcgaagaaatggttccgatggcgaaaactcgtgctttgtatgcaccccgacacctgttttcggaatgggtgacctgcggcaacgaaattgcgcgaaagcaccccaaacataagttttggatctaaactagtggattgggcatgttcgttgcgaaaaacgaagaaatggttccggtggaaaaaactcgtgctttgtatgcaccccgacacccgttttcggaatgggtgacgtgcggcaatgatatagcgcgaaacaaccccaaacatgagttttggacctaaagtagaagattgggcatgttcgttgcgaaaaacgaagaattggttccggtggcaaaaactcgtgcttcgtatgcacaccgacacccgttttggaaatgggtgacgtacgacaacgaaattgcgcgaaaccaccccacacatgagttttggacataaagtagtggattgggcatgttcattgcgaataacaaagaaatggttccggtagcgaaaactcatgctttgtatgcacccgacacccgtttccggaatgggtgacgtgcggcaatgatatagcgcgaaaccaccccaaacatgagttttggacctaaagtagaggattgggcatgttcgttgcgaaaaaagaattggttccggtggcaaaaactcgtgctttgtatgcaccccgacacacgttttggaaatgggtgacgtacgacaacgaaattgcgcgaaaccaccccaaacatgagttttggacctaaagtagtggattgggcatgttcgttgcgaaaaacgaagaaatggttccggtggcaaaaactcgtgctttatgcaccccgacaaccgttttcggaatgggtgacgtgcagcaacgatatagcgcgaaaccaccccaaacatgagttttggacctaaagtagaggattgggaatgttcgttgcgaaaaacgaagaattggttccggtggcaaaaactcgtgctttgtatgcaccccgacacccgttttgggaatgggtgacgtacggcaacgaaattgcgcgaaaccactccaaacatgagttgtggacctaaagtagtggattgggcatgctcgttgcaaaaatcgaagaaatggttccggtggcgaaaactcgtgctttgtatgcaccccgacacctgttttcggaatgggtgacgtgcggcaacgaaattgcgcgaaagcaccccaaacataagttttggatctaaactagtggattgggcatgttcgttgcgaaaaacgaagaaatggttccggtggaaaaaactcgtgctttgtatccgacacccgttttcggaatgggtgacgtgcggcaatgatatagcgcgaaacaaccccaaacatgagttttgtacctaaagtagaagattggtcatgttcgttgcgaaaaacgagaattggttccggtggcaaaaactcatgctttgtatgcaccccgacacccgttttgggaatgggtgacgtacggcaacgaaattgcgtgaaaccactccaaacatgagttgtggacctaaagtagtggattgggcatgctcgttgcaaaaatcgaagaaatggttccggtggcgaaaactcgtgctttgtatgcaccccgacacctgttttcggaatgggtgacctgcggcaacgaaattgcgcgaaagcaccccaaacataagttttggatctaaactagtggattgggcatgttcgttgcgaaaaacgaagaaatggttccggtggaaaaaactcgtgctttgtatgcaccccgacacccgttttcggaatgggtgacgtgcggcaatgatatagcgcgaaacaaccccaaacatgagttttggacctaaagtagaagattgggcatgttcgttgcgaaaaacgaagaattggttccggtggcaaaaactcgtgcttcgtatgcacaccgacacccgttttggaaatgggtgacgtacgacaacgaaattgcgcgaaaccaccccacacatgagttttggacataaagtagtggattgggcatgttcattgcgaataacaaagaaatggttccggtagcgaaaactcatgctttgtatgcacccgacacccgtttccggaatgggtgacgtgcggcaatgatatagcgcgaaaccaccccaaacatgagttttggacctaaagtagaagattgggcatgttcgttgcgaaaaaagaattggttccggtagcaaaaactcgtgctttgtatgcaccccgacacccgttttggaaatgtgtgacgtgcggcaacgaaattgcgcggaaccaccccaaacatgagttttggacctaaagtagtggattgggcatgttcgttgcaaaaaacgaagaaatggttccggtggcgaaaactcatgctttgtatgcaccccaacacccattttcggaatgggtgacgtgcggcaacgaaattacgcgaaaccaccccaaacatgagttttggacctaaagtagtggattgggcatgttcgttgcgaaaagcgtaaaatggttccggtggcaaaaactcgtgctttgtatgcaccccgacacccgttttcggaatgggtaacgtgcgacaacgatatagcgcgaaaccaccccaaacatgagttttggacctaaagtagaggattggtgatgtgcacccgttgggtgattgcccgatctttcgatgagagggtgtggaataagtcgattgggggaggagacgacgtcacggcccgactacaaccttccaaagacgctgcgccttagcaaccgatacaccacctcctatggctgtcacgatcttgtggagcgtgacaccctggccactagggcactcgttctgcgagcaatcgaagaactagcaagaacaagtagaacaattactgaattatcagatctaaatgtaggtttcaaaatcaaactccaatatggtggggttcctgatgtgcacccgttgggtgattgcccgatctttcgatgagagggtgtggaataactcgattgggggaggagacgacgttcacggcccgactacagccttccaaagacgctgcgccttagcaaccgatacaccacctcctatggctgtcacgatcttgtggagcgtgacaccctggccactagggcactcgtcctgcaagcaatcgaagaactagcaagaacaagtagaacaagtactgaattaccagatctaaatgtaggtttcaaagtcaaactccaatatggtggggttccgaagacaagaagacgggcggctgaactagcacgcgcgcttgcaagcaagtagcgagagctaaacttgatctaaacaaaacccgctgttcttggtggcggctagggggtttataaacatgggaggacgaccacaagggtattggggtcgtgctgcaaccctaggatgcgtccctaatggacctaacttgatacacgacccattgggccaaaatagggtgacgcagcaccatgggcagaaaaggcaggaaatgtctcggtaagaaaacaatgattacggcggcctcagaacagatatgactataattccggatccatatgaaagtagacttgataagctttccatgttgtgcttgaacattccaatccgagcccgcatctgaccgtggtgaccgtcacaagttggtgttcttctgcagtccgaatccagcatgttcaaatccttttccctttcggtcttctccctgattcctaagcaaaacaagagtgcacgggtc

SEQ ID NO: 436 - DNA, 17157 bp, Zea mays
  VARIATION (11693)..(11721): /replace="c" or "g" or "t"
  misc_feature (11693)..(11721): /note="Nucleotides given in the sequence have no preference with respect to those in the annotations for said positions"
  VARIATION (15719)..(15747): /replace="c" or "g" or "t"
  misc_feature (15719)..(15747): /note="Nucleotides given in the sequence have no preference with respect to those in the annotations for said positions"
  source: /note="Zea mays BAC clone full insert sequence contig bacm.pk024.f21.fis40"
ttgagccattgaatgtgatatagatgtgggtgcggtttggtcgtaagtgcaagcttctccaccatgtcgctgctagccaagttgttgcagctacctccatcaatgatcaaacgacatgaacgctccttaatgacacactttgtttgaaacaatgtatgtcgctgattctgctctgccttctccatttgtgcactaagcacacgctgtacaatgaggctctcataatgctctgcatcatctgcaccaatctgttcttcgggtggttccttagtgcctgcatcatcagccgcaagcaaagcaagtgtagcttcatccaaatcactagcagaagaatacccaccatcgtcttttaccaccaaaacacgctgattaggacaatcacgctgcacgtgtccatagcccttgcatcgataacacagaacatctcttgttctacccgtggaggctactgaagaggcactacctgctggtttctgggcagatttggttgctgaatttgtggaagatgcacgtggtttgtcgccggaggaaggcgggggtgctggtcgacttggcgagggagttggtgctagtgtacgaccggtcatggacgtagtcgtgcgctgttgccatggtgtagattttcctgcagaaacattagaccttgcactagcacgtcgtccctgcacttccctttcagctttgcaagcaagatgaaacaatcgggttacattagcataatctttataagcaaggatgtcctgaatttccctatttaacccgcccaaaaatctagccatagcagattcctcaccctcctctatgttacaacgcagcatacccatttgtaattcctgataatattcttctacacttttagtaccctgtctcaattgttgcaacttgtttaacatatcacgtgcataataagaaggaacaaatctagcccgcatgacccgtttcaacgcatcccaagtttgtggcatgttattaggattcttcttaccatgttctatccaccagacagaagcaaaatcagtaaactcactagtagcagctctaacccgcgcattctcaggaaattcatggcatgcaaacttttgatcaaccgcaatctcccaagtaatgtaagcatcagggtcatatttaccatcaaaaggaggtattttaaatttaaccttactaaaagcatcatcattaccatgtacctcacgtcggcgaaaaccacccatacctctacggttagtacgtagtcgccggcgattaggtgcttcttggtcatcttgttcagtatcagcaacatagtcatcccagttaccttcggcgccctcatcacgcccaccattgatattagcatgcatctcatcaaaccgcctcaagagtgcgacaaggctcttgtcaatatgagcaactgccatttccacatttgcaagtttggtgtttgtgtcgatctgtgtggcctccaattgccccatcttttcattcgtcacctgcatgtcattatcaagaccttccgtgtgcgtcttcaccagccttacaaagtgttgtatgatacccttggtgcgaggagagtgtggcatattacgagaagcatcatcaacctccaatcctgccatggttagacgaacagaggcaacaagaaaaaaaacgtgaaggaataaaaactctacaactattaggatgtagctactgcaaggcgctcactctcaacctgccacacaagctcttaccaattcttaccttgcacaacaggaggggtcagcaaccaacaagtctgcaaccgtggaataagtgtatcggtgccacagcaacacgacctgtcaaactgtagtcgaaatatgtagagttgtaggtgggctgaagcaaggaatacactagtaccacgttagttacaaaagcaagctgaataatcgttcaacggtggtactgtgctggtcctaggctaaaccaggctagagacgtgagcctaggcacaaaggtagtcactgaaaaagaacaactagcacagcacaaagagaaacaacagatttagagattcagcccccttcttcttcttttccttttttttttcttttctattctttttttttcttcttcttctgttttttttttgcaggggcctaaaccctttttttttcactatgacaacccaaacaataaagatattgctaacaacccctttaaatcagatttaacaaatcttgttaatatagaaagtccagaaatctctacgatgattgcggagcgctcagaacgaattttgagataaggtcagatccgttggaaagaagataagataagctttccagattgtatttaaacttccaaatcggatatgatatgtatccgtggtggcaaaaacgaaccagagatgtttttggtgatggtggatttcgtggtgaccaaaacgtggtagaactcaaaactctaaaggaataaactaagaccagcaactcgacacaaccgatgcaaccaaaaactcaacaagccctaactaagtagtactagtaaatgctcaatggtttataggattgcggtaaaactaatctactattttttggctttttctggactataggagataagaaaacagcgaagaaaagtaaatctctcaccgataaaccttgctctgataccaactgatgtgcacccgttgggtgattgcccgatctttcgatgagagggtgtggaataactcgattgggggaggagacgacgttcacggcccgactacagccttccaaagacgctgcgccttagcaaccgatacaccacctcctatggctgtcacgatcttgtggagcgtgacaccctggccactagggcactcgtcctgcaagcaatcgaagaactagcaagaacaagtagaacaagtactgaattaccagatctaaatgtaggtttcaaagtcaaactccaatatggtggggttccgaagacaagaagacgggcggctgaactagcacgcgcgcttgcaagcaagtagcgagagctaaacttgatctaaacaaaacccgctgttcttggtggcggctagggggtttataaacatgggaggacgaccacaagggtattggggtcgtgctgcaaccctaggatgcgtccctaatggacctaacttgatacacgacccattgggccaaaatagggtgacgcagcaccatgggcagaaaaggcaggaaatgtctcggtaagaaaacaatgattacggcggcctcagaacagatatgactataattccggatccatatgaaagtagacttgataagctttccatgttgtgcttgaacattccaatccgagcccgcatctgaccgtggtgaccgtcacaagttggtgttcttctgcagtccgaatccaacatgttcaaatccttttccctttcggtcttctccctgattcctaagcaaaacaagagtgcacgggtctccatggtctaaatatgatggacatgaactcaagagtgtaatcacctgatggttgagttgacgagcacgagcgcgagtaatgggaccagaaattggtacttgtattggtatagatgcatcagtagtgtggatgtcttcatcaagcatgcccaatccactactttaggtccaaaactcatgtttggggtggtttcgcgcaatttcgttgccgcacgtcacccattccgaaaacgggtgagcatgagttttcgccaccggaaccatttcttcgtttttcacaacgaacatgcccaatccactactttaggtccaaaactcatgtttggggtggtttcgcacaatttcgttgtcgtacgtcacccattcccaaaacgggtgtcgtggtgcatacaaagcaagagtttttaccaccggaaccaattcttcgttattcgcaacgaacatgtccaaaactcatgtttggggtggtttcgcgctacatcgttgccgcacgtcacccattccgaaaacaggtgtcgggtgcaaacaaagcatgagttttcgccaccggaaccatttctttgttattcgcaacgaacatgcccaatccactactttaggtccaaaactcatgtgtggggtggtttcgctcaatttcattgtcgtatgtcacccatttccaaaacgggtgtcggggtgcatacaaagcacgagtttttgccaccggaaccaattcttcgtttttcgcaacgaacatgcccaatcctctactttaggtccaaaactcatgtttggggttctttcgcgctatatcattgccgcacgtcacccattccgaaaacgagtgtcggggtggatacaaagcacgcgtttttgccaccggaaccatttcttcgtttttcgcaacgaacatgcccaatccactactttaggtccaaaactcatgtgttggggtggtttcgcacaatttcgttgtcgtacgtcacccattcccaaaacgggtgtcggggtgcatacaaagcttttttgccaccggaaccaattcttcgtttttcgcaacgaacatgctcaatcctctactttaggtccaaactcatgtttggggtggtttcgcgctacatcgttgccgcacgtcacccattccgaaaacgggtgtcggggtgcatacaaagcacgagtttttgctatcgaaaccatttctttgtttttcgcaactaacatgcccaatccactactttaggtccaaaactcatgtttgggttggtttcgcgcaatttcgttgtcgcacgtcacccattccgaaaacgggtgtcggggtgcatacaaagcacgagttttcgccgccggaaccaattcttcgtttttcgcaacgaacatgcccaatccactactttaggtccaaactcatatttggggtggttttgcgcaatttcgttgccggacgtcacacattccaaaaacgggtgtcggggtgcatacaaagcactagtttttgacaccggaaccatttcttcgtttttcgcaacgaacatgcccaatccactactttaggtccaaaactcatgtttggggttgtttcgcgctatatcattgccgcacgtcacccattccgaaaacgggtgtcggggtgcatacaaagcacgagtttttttgctatcgaaaccatttctttgtttttcgcaacgaacatgcccaatccactactttaggtccaaaactcatgtttggggtggtttcgcgcaatttcgttgccgcacgtcacccattcagaaaacgggtgagcatgagttttcgccaccggaaccatttcttcgtttttcgcaacgaacatgcccaatccactactttaggtccaaaactcatgtttggggtggtttcgcacaatttcgttgtcgtacgtcacccattcccaaaacgggtgtcggggtgcatacaaagcacgagttttcgccaccggaaccaattcttcgtttttcgcaacgaatattcccaatcctctacttcaggtccaaaactcatgtttggggtggttccgcgcaatttcgttgccgcacgtcacacattccgaaaacgggtgtcgggtgcatacaaagcacgatttttcgccaccggaaccatttcttcgttttttgcaacgaacatgcccaatctactcctttaggtccaaaactcatgtttggggtggtttcgcgaaatttcgttgccgcacgtaacccattccgaaaacaggtgtcgggtgcatacaaagcatgagttttcgccaccggaaccatttctttgttattcgcaactaacatgcctaatccactactttatgtccaaaactcatgtgtggggtggtttcgcgcaatttcgttgtcgtacgtcacccatttccaaaacgggtgtcggcgtgcatacaaagcacgagtttttgccaccggaaccaattcttcgtttttcgcaacgaacattcccaatcctctactttaggtccaaaaatcatgtttggggttgtttcgcgctatatcattgctgcacgtcacccattccggaaacgggtgtcggggtgcatacaaagcacaagtttttgccaccggaaccatttcttcgttttttgcaacaaacatgcccaatccactactttaggtccaaaacttaagtttggggtggtttcgtgcaatttcgttgccgcacgtcacccattccgaaaacgggtgtcggggtgcatacaaagcacaagttttcaccaccggaaccatttcttcgttttttgcaacgagcatgcccaatccactactttaggtccaaaactcatgtttggggtggtttcgcgcaatttcgttgccgcacgtcacccattccgaaaacgggtgagcatgagttttcgccaccggaaccatttcttcgtttttcgcaacgaacatgcccaatccactactttaggtccaaaactcatgtttggggtggtttcgcacaatttcgttgtcgtacgtcacccattcccaaaacgggtgtcggggtgcatacaaagcaagagtttttaccaccggaaccaattcttcgttattcgcaacgaacatgtccaaaactcatgtttggggtggtttcgcgctacatcgttgccgcacgtcacccattccgaaaacaggtgtcgggtgcaaacaaagcatgagttttcgccaccggaaccatttctttgttattcgcaacgaacatgcccaatccactactttaggtccaaaactcatgtgtggggtggtttcgctcaatttcattgtcgtatgtcacccatttccaaaacgggtgtcggggtgcatacaaagcacgagtttttttgctatcgaaaccatttctttgtttttcgcaacgaacatgcccaatccactactttaggtccaaaactcatgtttggggtggtttcgcgcaatttcgttgccgcacgtcacccattccgaaaacgggtgagcatgagttttcgccaccggaaccatttcttcgtttttcgcaacgaacatgcccaatccactactttaggtccaaaactcatgtttggggtggtttcgcacaatttcgttgtcgtacgtcacccattcccaaaacgggtgtcggggtgcatacaaagcaagagtttttgccaccggaaccaattcttcgtttttcgcaacgaacatgctcaatcctctactttaggtccaaaactcatgttggtgtggtttcgcgctacatcgttgccgcacgtcacccattccgtaaacgggtgtcggggtgcatacaaagcacgagttttgcccatcgaaaccatttcttcgtttttcgcaacgaacatgcccaatccactactttaggtccaaaactcatgtttggggtggttttgcgcaatttcgttgctgtacgtcacccatttccaaaacgggtgtcggggtgtgatgaggacatcctccactattacccgttggcaaagacgcaattggcccagttggcccaattgtagtcggatgacgaccgtgtgagcctcagaattatcccacctcgcttaacttgggaggaggaagccactttaaaagggagagccacccttcccccattggactagtcttttggggcgattgggtcttttatgaagacatccacactactgatacatctatgccaatacaagtaccaatttctggtcccattactcgcgctcgtgctcgtcaactcaaccatcaggtgattacactcttgagttcatgtccatcatatttagaccatggagacccgtgcactcttgttttgcttaggaaccagggagaagaccgaaagggaaaaggatttgaacatgctggattcggactgcagaagaacaccaacttgtgacggtcaccacggtcagatgcgggctcggattggaatgttcaagcacaacatggaatgcttatcaagtctactttcatatggatccggaattatagtcatatctgttctgaggccgccgtaatcattgttttcttaccgagacatttcctgccttttctgcccatggtgctgcgtcaccctattttggcctaatgggtcgtgtatcaagttaggtccattagggacgcatcctagggttgcagcacgaccccaatacccttgtggttgtccttccatgtttataaaccccctagccgcaaccaagaacagcgggttttgtttagatcaagtttagctctcgctacttgcttgtaagcgcgcgtgctggttcagccgcccgtcttcttgtcttcggaaccccaccatattggagtttgattttgaaacctacatttagatctggtattcagtacttgttctacttgttcttgctagttcttcgattgcttgcaggacgagtgccctagtggccagggtgtcacactccacaagatcgtgacagccataggaggtggtgtatcggttgctaaggcgcagcgtctttggaaggctatagtcgggccgtgaacgtcgtctcctcccccaatcgagttattccacaccctctcatcgaaagatcgggcaatcacccaacgggtgcacatcagttggtaatcagagcaaggtttatcggtgagagatttacttttcttcgctgttttcttatctcctatagtccagaaaaagccaaaaaatagtagattagttttaccgcaatcctataaaccattgagcatttactagtactacttagttagggcttgttgagtttttggttgcatcggttgtgtcgagttgctggtcttagtttattcctttagagttttgagttctaccacgttttggtcaccacgagatccaccatcaccataaactgaccatttgttgggcctcggccaaccccacctgggctcggtgtatcagggtgcatacaaagcacgagttttcgccaccggaaccaattcttcatttttcgcaacgaacattcccaatcctctactttaggtccaaaactcatgtttggggtggtttcgcgctatatcgttgccgcacgtcacccattccgaaaacgggtgtcggggtgcatacaaagcacgagttttggccaccggaaccatttcttcgtttttcacaacgaacatgcccaatacactactttaggtccaaaactcatgtttggggttgtttcgcgaaatttcgttgccgcacgtcacccattccgaaaacatgtgtcgggtgcatacaaagcatgagtattcgccaccggaaccatttctttgttattcgcaacgaacatgcccaatccactactttaggtccaaaactcatgtgtggggtggtttcgctcaatttcgttgtcgtacgtcacccatttccaaaacgggtgtcgaggtgcatacaaagcacgagtttttgccaccggaaccaattcttcgtttttcgcaacgaacatgcccaatcctctactttaggtccaaaactcatgtttggggttgtttcgcgctataacattgacgcacgtcacccattccgaaaacgggtgtcggggtgcatacaaagcacgagtttttgccaccggaaccatttcttcgtttttcgcaacgaacatgcccaatccactactttaggtccaaaacttatgtttggggtggttttgcgcaatttcgttgccgcacgtcacccattccgaaaacgggtgtcgaggtgcatacaaagcacgagtttttgccaccggaaccatttcttcgttttttgcaacgagcatgcccaatccactactttaggtccaaaactcatgtttggggtggtttcgcgcaatttcgttgccgcacgtcacccattccgaaaacgggtgtcggggtgtgttttcgccaccggaaccatttcttcgtttttcgcaacgaacatgcccaatccactactttaggtccaaaactcatgtttggggtggtttcgcataatttcgttgtcgtacgtcacccattcccacaacgggttgttcggggtgcatacaaagcaagagtttttgccaccgagaccaattcttcgtttttcgcaacgaacatgctcaatcctctactttaggtccaaaactcatgtttggggtggtttcgcgctacatcgttgccgcacgtcacccattccgaaaacgggtgtgatgaagacatccacactactgatacatctatgccaatacaagtaccaatttctggtcccattactcgcgctcgtgctcgtcaactcaaccatcaggtgattacactcttgagttcatgtccatcttatttagaccatagagacccgtgcactcttgttttgcttaggaaccagggagaagaccgaaagggaaaaggatttgaacatgctggattcggactgcagaagaacaccaacttgtgacggtcaccacggtcagatgcgggctcggattggaatgttcaagcacaacatggaaagcttatcaagtctactttcatatggatccggaattatagtcatatctgttctgaggccgccgtaatcattgttttcttaccgtgatattttctgccttttctgcccatggtgctgcgtcaccctattttggcccaatgggtcgtgtatcaagttaggtccattagggacgcatcctagggttgcagcacgaccccaatacccttgtggtcgtcctcccatgtttatagaccccctagtcgccaccaagaacagcgggttttgtttagatcaagtttagctctcgctacttgcttgcaagcgcgcgtgctagttcagccgcccgtcttcttgtcttcggaaccccaccatattggagtttgattctgaaacctacatttagatctggtaattcagtacttgttctacttgttcttgctagttcttcgattgcttgcaggacgagtgccctagtggccagggtgtcacgctccacaagatcgtgacagccataggaggtggtgtatcggttgctaaggcgcagcgtctttggaaggctgtagtcgggccgtgaacgtcgtctcctcccccaatcgagttattccacaccctctcatcgaaagatcgggcaatcacccaacgggtgcacatcagggtgtcggggtgcatacaaagaacgagtttttgccaccggaacgagttttcgcaacgaacatgcccaatacactactttaggtccaaaactcatgtttggggttgtttcgcgaaatttcgttgccgcacgtcacccattccgaaaacaggtgtcgggtgcaaacaaagcatgagttttcgccaccggaaccatttctttgttattcgcaacgaacatgcccaatccagtactttaggtccaaaactcatgtgtggggtggtttcgctcaatttcgttgtcgtacgtcacccatttccaaaatgggtgtcggggtgcatacaaagcacgagtttttgccaccgaaaccaattcttcgttttttgcaacgaacatgcccaatcctctactttaggtccaaaactcatgtttggggttgtttcgcgctacatcattgccgcacgtcacccattccgaaaacgggtgtcggggtgcataaaaagcacgagtttttgccaccggaaccatttcttcgtttttcgcaacgaatatgcccaatccactactttaggtccaaaacttatgtttggggtggtttcgcgcaatttcgttgccgcacgtcacccattccgaaaacgggtgtcggggtgcatacaaagcatgagtttttgccaccggaaccatttcttcgttttttgcaacgagcatgcccaatccactactttaggtccaaatcttatgtttggggtggtttcgggcaatttcgttgccgcacgtcacccattccgaaaacgggtgtcggggtgcatacaaagcacgagttaaaaaaaaaaaaaaaaaaaaaaaaaaaaacgcaatgaacatgcccaatccactactttaggtccaaaactcatgtttggggtggtttcgcgcaatttcattgccgcacgtcacccattccgaaaacgggtgtcagggtgcctacaaagcacgagttttcgccgccggaaccaattcttcgtttttcgcaacgaacatgcccaatccactactttaggtaaaaactcatatttggggtggtttcgcgcaatttcgttgccggacgtcacacattccgaaaatgggtgtcggggtgcatacaaagcacgactttttgccaccggaaccatttcttcgtttttcgcaatgaacctgcccaatccactactttaggtccaaaagtcatgtttggggtgttttcgcgcaatttcgttgtcgtacgtcacccattcccaaaacgagtgtcggggtgcatacaaagcacgagttttcgccactggaaccaattcttcgtttttcgcaacgaacatgcccaatccactacttttggtaaaaactcatatttggggtggtttcgcgcaatttcgttgcgggacgtcacacattccgaaaacgggtgtcggggtgcatacaaagcacgagtttttgacaccggaaccatttcttcgtttttcgcaacgaacatgcccaatccactactttaggtccaaaactcatgtttggggtggtttcgcacaatttcgttgccgcacgtcacccattccgaaaacgggtgtcggggtgcatacaaagcatgagtttttgccaccggaaccatttcttcgttttttgcaacgagcatgcccaatccactactttaggtccaaaacttatgtttggggtggttttgcgcaatttcgttgccgcacgtcacccattccgaaaacgagtgtcggggtgcatacaaagcacgagtttttgccaccggaaccatttcttcgtttttcgcaacgaacatgcccaatacactactttaggtaaaaactcatatttggggtggtttcgcgcaatttcgttgcgggacgtcacacattccgaaaacgggtgtcggggtgcatacaaagcacgagtttttgacaccggaaccatttcttcgtttttcgcaacgaacatgcccaattccactactttaggtccaaaactcatgtttggggtggtttcgcacaatttcgttgctgcacgtcacccattccgaaaacgggtgtcgggtgcatacaaagcatgagttttcgccaccggaaccatttcttcgttttccgcaacgaacatgcccaatccactactttaggtccaaaactcatgtttgggtggtttcgcgcaatttcgttgtcgtacgtcacccattcccaaaacgggtgtcggggtgcatacaaagcaagagtttttgccaccggaaccaattcttcgtttttcgcaacgaacatgctcaatcctctactttaggtccaaaactcatgtttggggtggtttcgcgctacatcgttgccgcacgaaacccattccgaaaacgggtgtcggggtgcatacaaagcacgagtttttgccaccggaacaatttcttcgtttttcgcaacgaacatgcccaatacactactttaggtccaaaactcatgtttggggttgtttcgcgaaatttcgttgccgcacgtcacccattccgaaaacaggtgtcgggtgcatacaaagaatgagttttagccaccggaaccatttctttgttattcacaacgaacatgcccaatccactactttaggtccaaaactcatgtgatggggtggtttcgctcaatttcgttgtcgtacgtcacccatttccaaaacgggtgtcggggtgcatacaaagcacgagtttttgccaccggaaccaattcttcgtttttcgcaacgaacatgcccaatcctctactttaggtccaaaactcatgtttggggttgtttcgcgctatatcattgccgcacgtcacccattccgaaaaggggtgtcggggtgcatacaaagcacgagtttttgccaccagaaccatttcttcgtttttcacaatgagcatgcccaatccactaatttaggtcgaaaacttatgtttggggtggtttcgcgcaatttcattggcgcacgtcacccattccgaaaacgggtgtcggggtgcatacaaagcacgagtttttgccaccggaaccatttcttcgttttttgcaacgagcatgcccaatccactactttaggtccaaaactcatgtttggggtggtttcgcgcaatttcgttgccgcacgtcacccattccgaaaacgggtgagcatgagttttttccaccggaaccatttcttcgtttttcgcaacgaacatgcctaatcctctactttaggtcaaaaactcatgtttggggtggtttcgcgcaatttcgttgtcgtacgtcacccattcccaaaacgggtgttggggtgcatacaaagcacgagtttttgccaccggaaccaattcttcgtttttcgtaacgaacatgcccaatcctctacttcaggtccaaaactcatgtttggggtggtttcgcgctacatcgttgccgcacgtcacccattccgaaaacgggtgtcgaggtgcatacaaagcacgagtttttgctatcaaaaccatttctttgtttttcgcaacgaacatgcccaatccactactttaggtccaaaactcatgtttggggtggtttcgcgcaatttcgttgccgcacttcacccattccgaaaacgggtgtcggggtgcatacaaagcacgagttttcgccgccggaaccaattcttcgtttttcgccacgaacatgcccaatccactactttaggtaaaaactcatatttggggtggtttcgcgcaatttcgttgccggacgtcacacattccgaaacgggtgtcggtacaaagcacgactttttgccaccggaaccatttcttcgtttttcgcaacgaacatgcccagtccactactttaggtccaaaactcacgtttggggtggtttcgcgcaattttgttgtcgcacgtcacccattccgaaaacgactgtcgggtgcatacaaagcatgagttttcgccaccggaaccatgtcttcgttttccgcaacgaacatgcccagtccactactttaggtccaaaactcatgtttggggtggtttcacgcaatttcgttgccgtacgtcacccattcccaaaacgggtgtcggggtgcatacaaagcacgagttttcgccaccggaaccaattcttcgtttttcgcaacgaacatgcccaatccactactttaggtaaaaactcatatttggggtggtttcgcgcaatttcgttgcgggacgtcacacattccgaaaacggttgtcggggtgcatacaaagcactagtttttgacaccggaaccatttcttcgtttttcgcaacgaacatgcccaatccactactttaggtccaaaactcatgtttggggtggtttcgcacaatttcgttgccgcacgtcacccattccgaaaacgggtgtcgggtgcatacaaagcatgagttttcgccaccagaaccatttcttcgttttccgcaacgaacatgcccaatccactactttaggtccaaaactcatgtttggggtggtttcgcgcaatttcgttgtcgtacgtctcccattcccaaaacgggtgtcggggtgcatacaaagcacgagtttttgccaccggaaccaattcttcgtttttcgcaacgaacatgcccaatcctctactttaggtccaaaactcatgtttggcgtggtttcgcacaatttcgttgtcgtacgtcacccattctcaaaacgggtgtcggggtgcatacaaagcaagagttttttccaccggaaccaattcttcgtttttcgcaacgaacacgctcaatcctctactttaggtccaaaactcatgtttgggttggtttcgcgctacatcgttgccgcacgtcacccattccgaaaacgggtgtcggggtgcatacaaagcacgagttaaaaaaaaaaaaaaaaaaaaaaaaaaaaacgcaacgaacatgcccggtccaaaactcatgtttggggtggtttcgcgcaatttcgttgccgcacttcacccattccgaaaaggggtgtcggggtgcatacaaagcacgagttttcgccgccggaaccaattcttcgtttttcgccacgaacatgcccaatccactactttaggtaaaaactcatattttgggtggtttcgcgcaatttcgttgccggacgtcacacattccgaaacgggtgtcggtacaaagcacgactttttgccaccggaaccatttcttcgtttttcgcaacgaacatgcccagtccactactttaggtccaaaactcatgtttggggtggtttcgcgcaatttcgttgtcgcacgtcacccattccgaaaacgactgtcaggtgcatacaaagcatgagttttcgccaccggacgttttccgcaacgaacatgcccagtccactactttaggtccaaaactcatgtttggggatgatgcggacatcaacaccaacacgagcacatctacaccagcagcaccttctccagcccaggcgccaccccttccacctgggccagtgactcgggcccgtgcaagagaattgaactacatcatgttgttaaagaacgaaggcccggaagaatagacgaccagcccaattgcggcccataatggacgacctagggttggccgcccctaggggctgcgccccctctctatttattcaggagctgcgcctcctttatttcctgagttttgttttacgttagccttagctactctcgaacacgcgcaaatctgcgctgtcttcgtgtattcagaactccaccctcgagtaatagattagattgctcgcatcttgttcttgttcgttcttcgattgcgcacaggaaacgatcttcgtgatcaggccgatctcgcatcagcaaggtcggtaaccacagggagttggttcagcgattgcattggcgcctcgggcttgctcgtcgtagtcggatcgcaagggtcatcttccaccaaatcggaattatctctactcgccgaaagatcgggcacctcagctacatcaattggtatcagatttccaggttgatcggtgagtttatcgagcgttttttttcctacagtccacaaaaccgcataaaaattcaggttagatcttatcccagcacccttttgagcctcgcactttctttcaataatctgcattgttgaatttgtgtgctttcgcgtcatttgttgctggttgcattgtgttcttccaccattcaaaccctagcgccgccaccatcttccgtttgatcacgccacaaaccgagtcaacattgtttccttgtttttctccttcggttacgtcaaaaaaaaacagaaaaaaacaaaccgagtcaacggccgtttccttgattatcaggta

SEQ ID NO: 437 - DNA, 717 bp, Zea mays
  VARIATION (5)..(101): /replace="c" or "g" or "t"
  misc_feature (5)..(101): /note="Nucleotides given in the sequence have no preference with respect to those in the annotations for said positions"
  source: /note="Zea mays BAC clone full insert sequence contig bacm.pk155.l13.fis1"
atccaaaaaaaaaaaaaaaaaaaaaaaaaaaaaaaaaaaaaaaaaaaaaaaaaaaaaaaaaaaaaaaaaaaaaaaaaaaaaaaaaaaaaaaaaaaaaaaaattgggcatgtccgttgcgaaaaacgaagaaattgatcctgtggcaaaaactcgttctttgtatgcaccccgacacccgtttttggattgggttacatgtggcaacgaaattgcgcgaaaccacgccaaacatgagttttggacctaaagtagtggattgagaatgttcgttgcgaaaaacaaagaaatggttccggtggcataaactcgtgcttgtatgcaccccgacacccattttcggaaatgggtgacgtgcgacaacgaaattgtgcgaaacacccccaacatgagttttggactaaattagtgggatgggcttgttggttgcgaaaacgaagaaatggttccggtggcaaaactcgtgcttgtacgcaccccgacaccccgttttcggaaatgggggacatgcgggcaacaaatttcccgaaaaccccccccaacagggttttttggacccaaaaaattggattggggaaattttttttcaaaaaaaaaaaaaaaattaccctgggggcaaaaaattgggctttttagaccccccaacaccccttttcaaaaaggaaaaaatggcgccacaaaaatttggggaaaaaccccccaaaaagttttttgtggcg

SEQ ID NO: 438 - DNA, 773 bp, Zea mays
  VARIATION (48)..(76): /replace="c" or "g" or "t"
  misc_feature (48)..(76): /note="Nucleotides given in the sequence have no preference with respect to those in the annotations for said positions"
  source: /note="Zea mays BAC clone full insert sequence contig bacm.pk155.l13.fis2"
gacggcgaaacgactcctatagggcgaagtgggtatttttatgcttgaaaaaaaaaaaaaaaaaaaaaaaaaaaaatgtgggacctaaagtaatggattaggcatgttcgttgcgaaaaacgaagaaatggttccagtggcaaaaactcgtgctttgtatgcaccccgacacccatttcgaaataagtgacgtgcggcaacgaaattgcgcaaaaccatccccaacattagttttggacctaaagtagtggattaggcatgttcgttgcgaaaaacgaagaaatggttctggtggcaaaaactcgtgctttgtatgcaccccgacacccgttttcgaaatgggtgacgtgcggcaacgaaattgcgcgaaaccaccccaaacatgagttttggacctaaagtagtggattgggcatgttcgttgcgaaaaacgaagaaatggttccggtggcaaaaactcatgctttgaatgcaatccaacacccattttcggaatgggtgacgtgcggcaacgaaattgcgcgaaaccaccccaaacatgagttttggacctaaattagtggattgggcatgttcgttgcgaaaaacgaagaatggttccggtggcaaaaactcgcgctttgtatgccccgcgacacctgttttcagaatgggtgacgtgcggcaacaaaatgcgcgaaaccccccaaactgagttttgaacctaattactgaattgggcatggtcgttgcaaaaaagaaaaatggttcgggtggcaaaactcggctttggg

SEQ ID NO: 439 - DNA, 558 bp, Zea mays
  VARIATION (55)..(55): /replace="c" or "g" or "t"
  misc_feature (55): /note="Nucleotide given in the sequence has no preference with respect to those in the annotation for said position"
  source: /note="Zea mays BAC clone full insert sequence contig bacm.pk155.l13.fis3"
gccgtatagactcctatcgggcgaatgggaccatacaaaaggcgaggtcgacggaatcgttaccttgatagcgacaaccacaaaaatgctatccctccccttcttagttctaggcaatcccaaaacaaaatccatcgaaatatcaatccaaggggaagtaggaacaggcaaaggcatatacaaaccatggttgttcaaccgtgacttagctttctgacaagtagtgcagcgtgcaacaaggcgctcaacatcagcgcgcatccgaggccaaaagaagtgggcagccaacacctcatgtgtcttgtagacgccaaagtgccccatgagaccgccctccatgtgcttccctgtaacaaccaaaagacgaacccgagctaagctgggaaacacaccgctttggttagccgcgaaaacaaggaaaccccatcccgggaagggtgaaaaatttgcccccaataggttttccccattttaataccaaaggggcccgaaaaaaccatctttttaaaaaaaacgggcattccgtcaaaaaaattatttggaacccttttttaaaac

SEQ ID NO: 440 - DNA, 777 bp, Zea mays
  VARIATION (40)..(92): /replace="c" or "g" or "t"
  misc_feature (40)..(92): /note="Nucleotides given in the sequence have no preference with respect to those in the annotations for said positions"
  VARIATION (499)..(499): /replace="c" or "g" or "t"
  misc_feature (499): /note="Nucleotide given in the sequence has no preference with respect to those in the annotation for said position"
  source: /note="Zea mays BAC clone full insert sequence contig bacm.pk155.l13.fis4"
accagcgcgattacctcctaagggacaacttccgacgcgaaaaaaaaaaaaaaaaaaaaaaaaaaaaaaaaaaaaaaaaaaaaaaaaaaaaagtgctttgtatgcaccgcgacacccgttttcggaatgcgtgacgtgcggcaacgaaattgcgcgaaaccaccccaaacatgagttttagacctaaagtagtggattgagaatgttcgttgcgaaaaacgaagaaatggttccggtggcaaaaactcgtgctttgtatgcaccgcgacacccgttttcggaatgggtgacgtgcgacaacgaaattgcgcgaaaccaccccaaacatgagttttggacctaaattactggattgggcatattcgttgcgaaaaacgaagaaatggttccggtggcaaaaactcgtgctttgtatgcaccccgacaccctttttcggaaagggtgacgtgcggcaacgaaattgcgcgaaaccgacctgagtttgtgtatctaaactaatggattgggcatgttcgttgccgtaaacaaacaaatggatctggtggcaaagactcgtgcttgtatgtacctcgacacccgttttcggtattgggtgacgtggcgaccacgaaattgcgcgtaaccaccccccaacccgatttttggacctaaagtaatggattgggaatggttcgttgcgaaaaaccaaaaaatggatccgggtggcaaaaactcaagcttggtttgacccccgacacccccttccctaattggggaaggggcgaaaaacaaaaata

SEQ ID NO: 441 - DNA, 784 bp, Zea mays
  VARIATION (56)..(56): /replace="c" or "g" or "t"
  misc_feature (56): /note="Nucleotide given in the sequence has no preference with respect to those in the annotation for said position"
  VARIATION (413)..(413): /replace="c" or "g" or "t"
  misc_feature (413): /note="Nucleotide given in the sequence has no preference with respect to those in the annotation for said position"
  source: /note="Zea mays BAC clone full insert sequence contig bacm.pk155.l13.fis5"
ggcgaaacgactcctatcaggggagtggcgagtttccattgctcgaggtcgacggaatcgtgacaaaagatgcgaagaaatgattctggtggcaaaaactcgtgctttgtatgcacagcgacacccgttttcggaatgagtgacgtgcggcaacgaaattgcgcgaaaccaccccaaacattagttttgtacctaaagtagtggattgggcatgttcgttgtgaaaaacgaagaaatggttccggtggcaaaaactcgtgcttgtatgcaccccgacacccattttcggaatgggtgacgtgcggcaacgaaattgcgcgaaaccaccccaaacatgagttttggacctaaagtagtggattgggcatgttcgttgcgaaaaacgaagaaatagttccggtggcaaaaactcatgcttgtatgcaccccgacacctgttttcggaatgggtgacgtgtgacaaccaaattgcgctgaaaccaccccaaacatgtgttttggcctcaagtagtggattgagaatatttcttgcgaaaaacaaagtaaatggtcccggggcaaaaactcgttctttggatgcaccccgacacccgcttttcgaaaggggtgacgggcggcaaccaaaatgtgcgaaaccaccccaaacatgtgtttttgggcccaaaagaatggattgtggctgttccttgttaaaaaaaaaaaaaatgtttccgggggcaaaaaaccctgctttttaagcccccccaacccccttttttgaaaggagggacgggggacaacaaaa

SEQ ID NO: 442 - DNA, 766 bp, Zea mays
  source: /note="Zea mays BAC clone full insert sequence contig bacm.pk155.l13.fis6"
ggccgcgaacactcctatcggggagtgcgtactcaactgtcaggcgacggacgtaaccaagaacggtaggtccaaacacatgtttggggtggtttcgcgcaattttgttgccgcacgtcacccattccgaaaacgggtatcggggtgcatacaaagcatgagtttttgccaccggaaccatttcttcgtttttcgcaacgaacatgcccaatccactaatttaggtccaaaactcatgtttggggtggtttcgcgcaatttcgttgccgcacgtcacccattacgaaaacgggtgtcggggtgcataaaaagcatgagtttttgccaccggaaccatttcttcgtttttcgcaatgaacatgtccaatccactactttaggtccaaaactcatgtttggggtggtttcgcgcaattttgttgccgcacgtaatccattccgaaaacgggtatcgaggtgcatacaagcacgagtttttgccaccagaaccatttcttcgtttttcgcaatgaacatgcccaatccactactttaggtccaaaactcatgtttggggtggtttcgcgcaatttcgttgccgcacatcacccattccgaaaagggtgtcggggtgctaccaagcacaagtttttccaccgggaccatttcttcctttttcgcaccaacatgcccaatccagtaatttagggcccaaaacccatgttgggggggtttccggcaaatttcttggccccagtcacccattctgaaaaacggggtggggggc

SEQ ID NO: 443 - DNA, 769 bp, Zea mays
  source: /note="Zea mays BAC clone full insert sequence contig bacm.pk155.l13.fis7"
gaccgctaacactcctataggggagtgggatcatccatcgtcgggcgaggatcgttaccttgatgcgccccgacacccgttttcgaaatgggtgacgtgcggcaacgaaattgcgcgaaaccaccccaaacatgagttttggacctaaagtagtggattgggcatgttcgttgcgaaaaacgaagaaatggttccggtggcaaaaactcatgctttgaatgcaatccaacacccattttcggaatgggtgacgtgcggcaacgaaattgcgcgaaaccaccccaaacatgagttttggacctaaattagtggattgggcatgttcgttgcgaaaaacgaagaaatggttccggtggcaaaaactcgcgctttgtatgcaccgcgacacctgctttcagaatgggtgacgtgcggcaacgaaattgcgcgaaaccaccccaaacatgagttttggacctaaattactggattgggcatgttcgttgcgaaaaaagaagaaatggttccggtggcaaaaactcgtgctttgtagcaccccgacacccgttttcggaatgggtgatgtgcggcaacgaaattgcgcgaaaccccccaaacatgagttttggacctaaagtagtggattgggcatgttcattgcaaaaaacgaagaatggttccggtggccaaaactcgtgcttgtagccccccgatacccctttccgaaatggattacggggggcaacaaatgcgcgaaaccccccaaaaatgagtttgggcctaagtagtg

SEQ ID NO: 444 - DNA, 734 bp, Zea mays
  VARIATION (13)..(97): /replace="c" or "g" or "t"
  misc_feature (13)..(97): /note="Nucleotides given in the sequence have no preference with respect to those in the annotations for said positions"
  VARIATION (679)..(680): /replace="c" or "g" or "t"
  misc_feature (679)..(680): /note="Nucleotides given in the sequence have no preference with respect to those in the annotations for said positions"
  VARIATION (685)..(685): /replace="c" or "g" or "t"
  misc_feature (685): /note="Nucleotide given in the sequence has no preference with respect to those in the annotation for said position"
  VARIATION (689)..(690): /replace="c" or "g" or "t"
  misc_feature (689)..(690): /note="Nucleotides given in the sequence have no preference with respect to those in the annotations for said positions"
  VARIATION (719)..(719): /replace="c" or "g" or "t"
  misc_feature (719): /note="Nucleotide given in the sequence has no preference with respect to those in the annotation for said position"
  source: /note="Zea mays BAC clone full insert sequence contig bacm.pk155.l13.fis8"
atccagcccattaaaaaaaaaaaaaaaaaaaaaaaaaaaaaaaaaaaaaaaaaaaaaaaaaaaaaaaaaaaaaaaaaaaaaaaaaaaaaaaaaaaaagcaaagtaggaaaccgatcctttctcaagtgcaaccaaaccatatcacctggctcaaaagtaacaagttttcttcctttactaccagcaacctgattttttgcattagtaacagcaatgttttgttgagtttgttcatggaggttaatcatttgttcaacatgtgcaacagcatctatgtgtggggcgtccgcagcatcaagcgaaaacaaagcaataggcgccctaggaatgtaaccataaacaatttgaaaagggcacatctttgtagaagaatatgttgcatgattataagcaaactcaacatgatgcaagcaatcctcccaacgtttcaaatttttgtctaaaacagccctaagcatggtagacaaagttcgattaactacctcagtttgaccatcagtctgaggggtgacaagtggtgctaaacagcaatttagttcccaatttattccacagagatctccaaaaatgactaagaaacttagcatcacgatccgagactattgtatttggaataaccgggccaaaatggcccaaaaaaaaaggggggggggggggggggggggccccccccccccaaaaaaaaaggaagggggggggggggggggggggggggtggatgtgggaggttgttt

SEQ ID NO: 445 - DNA, 766 bp, Zea mays
  VARIATION (11)..(76): /replace="c" or "g" or "t"
  misc_feature (11)..(76): /note="Nucleotides given in the sequence have no preference with respect to those in the annotations for said positions"
  source: /note="Zea mays BAC clone full insert sequence contig bacm.pk155.l13.fis9"
gacccgtataaaaaaaaaaaaaaaaaaaaaaaaaaaaaaaaaaaaaaaaaaaaaaaaaaaaaaaaaaaaaaaaaaaaacaaagaaatggttctagtggcataaactcgtgcttgtatgcacgctcgacacccgttttcggaatgggtgacgtgcggcaacgaaattgcgtgaaaccaccccaagcatgagttttggacctaaattactggattgggcatgttcgttgcgaaaaacgaagaaatggttccggtggcaaaaactcgtgctttgtatgcaccctgacacccgttttcggaaagggtgacgtgcggcaacgaaattgcgcgaaaccaccccaaacatgagttttggacctaaattactggattgggcatgttcgttgcgaaaaacgaagaaatggttccggtggcaaaaactcgtgctttgtatgcaccctgacacccgttttcggaaagggtgacgtgcggcaacgaaattgcgcggaaatccacatgagttttggactctacctaatggattgggcatggttcgttgcgaaccaacaaaaaaaatgaatctggtggcgaaaactcaaggcttggattgcaccccgaccacccgattttcgggatgggatgacggggcgggacgaaattggcttgaacccacccccaccctaaaatttgggcctaaactaaaaagaattgggctagttccttttccaaaacaaaaaaaaaaaattcggggggcaaaaaaaaaaacctgggttggcccccccccccccgc

SEQ ID NO: 446 - DNA, 772 bp, Zea mays
  VARIATION (4)..(104): /replace="c" or "g" or "t"
  misc_feature (4)..(104): /note="Nucleotides given in the sequence have no preference with respect to those in the annotations for said positions"
  source: /note="Zea mays BAC clone full insert sequence contig bacm.pk155.l13.fis10"
acgaaaaaaaaaaaaaaaaaaaaaaaaaaaaaaaaaaaaaaaaaaaaaaaaaaaaaaaaaaaaaaaaaaaaaaaaaaaaaaaaaaaaaaaaaaaaaaaaaaaaattgccggtcacccattccgaaaatgggtgtcggggtgcatacaaagcacgagtttttgcctccggatcaatttcttcgtttttcgcaacaaacatgcccaatccactactttaggtccaaaactcatgtttggggtggtttcgcggaatttcgttgccgcacgtcactcattccgaaaatgggtcttggggtgcatacaaagcacgagtttttgccaccgaaactgtttcttcgtttttcacaacgaacatgcccaatccactactttaggtccaaaactcatgtttggggtggtttcgcgcaatttcgttgccgcacgtcaccccttccgaaaacaggtgtcgggttgcatacaaatcacgagtttttgccaccggatcaatttcttcgtttttcgcaacgaacatgcctaatccactaatttaggtccaaaactcatgtttggggtggtttcgcgtaatttcgttgcagcacgtcacccattccgaaaatgggtgttgggttgcttcaaagcatgagtttttgccaccggaaacatttcttcgttttttcgcacgaacatgcccaatccactactttagtccaaaactcatgcttgggggtggtttcacgcaatttcgttgccgcacgtcactcattccaaaaacggttgtcggggtgcatacaaa

SEQ ID NO: 447 - DNA, 771 bp, Zea mays
  VARIATION (12)..(75): /replace="c" or "g" or "t"
  misc_feature (12)..(75): /note="Nucleotides given in the sequence have no preference with respect to those in the annotations for said positions"
  source: /note="Zea mays BAC clone full insert sequence contig bacm.pk155.l13.fis11"
gacgccgtataaaaaaaaaaaaaaaaaaaaaaaaaaaaaaaaaaaaaaaaaaaaaaaaaaaaaaaaaaaaaaaaattgaacagggaaattcaggatatacttgattataaggattattttgatataaccacattgtttgaatatgcttgcaaagctgaacgtgaagtgcagggacgacgatcaaagacatatactaactcttttgcaggccggggtccaacacacagctcaactccttccagccctgcacctcctacgcctagcactacatcgcgcacagggccgaccaagccagtggcgccccctgccaaaggcgccgcttcttccataggacgtacacgggatattcagtgccatcgttgcagagggtttgggcacatgattcgggactgcccaaacaagcgtaccttgcttatacgtgacaatggtgagtactcttcagccagtgattctgaggaaactagtcatgctatgattgccactaaccatgcagaaaatgaggaagtccacgttgatcccatcgacgccgataggtatgagagtcttgttgtgcagcgtgttctcagcacacaggttgcacagggccgaaaaaaatcagcgacacactctattccataccaagggcgtcgtgcacgaacggtcgattcgcatcatcatcgatagtggcagctgcaacaatttggcaagtacagcgttggtagagaaaatattccttgccactcgcacacatcacatccgtatacatttcatggcttaatgaggggggaaaac

SEQ ID NO: 448 - DNA, 745 bp, Zea mays
  VARIATION (10)..(77): /replace="c" or "g" or "t"
  misc_feature (10)..(77): /note="Nucleotides given in the sequence have no preference with respect to those in the annotations for said positions"
  VARIATION (307)..(307): /replace="c" or "g" or "t"
  misc_feature (307): /note="Nucleotide given in the sequence has no preference with respect to those in the annotation for said position"
  VARIATION (403)..(403): /replace="c" or "g" or "t"
  misc_feature (403): /note="Nucleotide given in the sequence has no preference with respect to those in the annotation for said position"
  source: /note="Zea mays BAC clone full insert sequence contig bacm.pk155.l13.fis12"
gacggcgaaaaaaaaaaaaaaaaaaaaaaaaaaaaaaaaaaaaaaaaaaaaaaaaaaaaaaaaaaaaaaaaaaaaaagatgtaaaacaaaacttgaaaaacaaaggaggcgcaactcctatataaatagagagagggggcgcagccctaggggcggccaaccctagtcatccactatgggccgcagttgggctggtcgtctattcttctgggccctcattcttcagtagcatgacgaagttaagatctctggcacgggcccgaagtgattgggcccagcctaatgaaggaaagtgcgcttgatgtgaaggtgctgctggtgtagtcgtactcatagtgatgtcctcatcatcctcccctttctgaaagtgagtcgtcctcgacgggcactcctcatcctcggacataatatgtttcaaatctgccacattaaaactagtggaaacccccaaaattccgcaggccgggtcagggaattaagcattacccattaatcttggttaaccccctaaaaaggggcccccccccccgagggctttattttaaaaagggcccaaaattagaaaacccatccctttttctagaggggaaccaaaaaccatttcccctgggtccaaaaaaaaaaaagtttttttcccttttatcacccccaaaccccgttttttttgcatataaaaaaaccaaaattttttttttaattttttgtttcggggggtaaaaaaatttttttctccaaagggggaaaa

SEQ ID NO: 449 - DNA, 490 bp, Zea mays
  source: /note="Zea mays BAC clone full insert sequence contig bacm.pk155.l13.fis13"
aagcatgagtttttgccaccgcaaccatttcttcgtttttcgcaaaaaacatgcccaatccaatactttgggtccaaaactcatgtttggggtggtttcgcgcaatttcgttgccgcacgtcacccattccgaaaacgggtgtcggggtgcatacaagcacgagtttttgccaccggaaccatttcttcgtttttcgcaacgaacatgcccaatccactactttaagtccataactcatgtttggggtggtttcgcgcaatttcgttgccacacgtcacccattccgaaaacgggtgtcggggtgcatacaagcacgagtttttgccaccggaaccatttcttcgtttttcgcaacgaacatgcccaatccactactttaggtcaaaaactaatgtttggggtggtttcgcgcaatttcgttgccgcacgtcacccattccgaaaacggatgtcggggtgcatacaagcacgagtttttgccaccgaaac

SEQ ID NO: 450 - DNA, 926 bp, Zea mays
  VARIATION (750)..(750): /replace="c" or "g" or "t"
  misc_feature (750): /note="Nucleotide given in the sequence has no preference with respect to those in the annotation for said position"
  VARIATION (812)..(812): /replace="c" or "g" or "t"
  misc_feature (812): /note="Nucleotide given in the sequence has no preference with respect to those in the annotation for said position"
  VARIATION (838)..(838): /replace="c" or "g" or "t"
  misc_feature (838): /note="Nucleotide given in the sequence has no preference with respect to those in the annotation for said position"
  source: /note="Zea mays BAC clone full insert sequence contig bacm.pk155.l13.fis14"
tgataaatactttggaaaacactaagttttgaaaattggtggtggtgcggtccttttgctagggctcatactttctccccctttggcatgaatcgccaaaaacggaatcattagagccctcgaagtactatcttcccctttggtcataagtaaatgagttaagattataccaaagacgaagtccggtccttttgcttggggcttttactctctcccccaaagacaaggtccttttcttggagcgatggcgaaggatgagttacggagtggaagcctttgtctttcgccgaagactccaatttcctttcaatatacctatgacttggtttgaaatagactcgaaaacacattagtcatagcatatatgatcaaaagtatgaatgagctatgtgtgcaatctagcaaaagaagttgcgagaatcaagaatattgagctcatgcctaagtttggtaaaagtttgttcatcaagaggcttggtaaagatatcggctaattgatctttagtgttaatgtatgaaatctcgatatcccccttttgttggtgatccctaagaaaatgataccgaatggctatgtgcttagtgcggctatgctcgacgggattgtcggccattttgattgcactctcattatcacatagcaaagggactttggttaatttgtaaccgtagtcccgtagggtttgcctcatccaaagcaattgcgcgcaacagtgacctgcggcaatgtactcggcttcggcggtggaaagagcgaccgaattttgcttctttgaagcccaagacaccaaggatcttcccaagaactggcaaagtcccgatgtgcttttcctataaatttgcaccccgcccatcggcatccgaataacaatcaaatcaaatgtggatccccgagggtaccaaagcccaactttagagtataagca

SEQ ID NO: 451 - DNA, 892 bp, Zea mays
  source: /note="Zea mays BAC clone full insert sequence contig bacm.pk155.l13.fis15"
agaaagcgggtgtcggggtgcatacaagcacaagtttttgccaccggaaccatttcttcgtttttcgcaacgaacactcacaatccactactttaggtccaaaacacatgtttggggtggtttcgcgcaatttcgttgtcgcacgtcacccattccgaaaacgggtgtcggggtgcatacaagcacgagtttttgccaccggaaccatttcttcgtttttcgcaacgaacatgcccaatctactaatttaggtccaaaacttatgttttgggtggtttcgtgcaatttcgttgtcgcacgtcacccattccgaaaacgggtgttggattgcattcaaagcacgagtttttgccaccggaaccatttcttcgtttttcgcaacgaacatgcccaatccactactttagttccaaaactcatgtttggggtggtttcgcgcaattttgttgtcgcacgtcactcattccgaaaacgggtgtcgcggtgcatacaaagcacgagttttttgcaccgggaaaccatttctcgttttttcgcaacgaaaaatgcccaaatccactaactttagggtcaaaaacccatggtttggggggtgggtttcccccacaattttccgtttgccccaccggtcccccccatttcccaaaaaaagaggggtggcggggggggggcctacacaaaaaacgaatttttttgcccccccggagaaaacttttttttttgtttttttccccacaaaagaaatctccccaaccccccaatcttttaggggccaaaaaaccctttttttttggggggggggtgtttctcccccaaatattttttttgtgccccccggtgtccccccatttttaaaaaaaaaaggggggtgggggggtgtgcatcaaaaaac

SEQ ID NO: 452 - DNA, 660 bp, Zea mays
  source: /note="Zea mays BAC clone full insert sequence contig bacm.pk155.l13.fis16"
ccaggctttgtgccaagaagatccaagtgtgtagccaagcttccccctaggtggaaatcaagctgctcacattatctggtatctgcatgaagtcggggttgaaaatgagcaagctacgctatttatggatgatctggagcattgtgccatagtttagtaagcctctttcacttaaccaagttaaggctctaaattagtctatttggttgggagatccctgatgagctccaggtggatccttcgcggggatgcagctttccccttgagttggtctccccttcatggtcattttcttcttttgactcatgggtagattcgaaagatgagtcaatattcattcccttaaggagctgcctttacttggaagaaaatctacttggtctaaccagaaagaagacacgaccttagttaagcttgataagagtgttctgcactactgattgggaggcttcatttcctaactgcattttacatagcaatgcctcgaatatgtctgacaattgccacttaattttgggtcttaagatgggccttaaaggaagaaaacgttttcattttgaaagtttttggcatcagatgcaaagctttcaagaggtggtagatgaatcttggaactccaacctttctgttaattgtcccatgaagtgactagctctcaag

SEQ ID NO: 453 - DNA, 775 bp, Zea mays
  VARIATION (717)..(717): /replace="c" or "g" or "t"
  misc_feature (717): /note="Nucleotide given in the sequence has no preference with respect to those in the annotation for said position"
  source: /note="Zea mays BAC clone full insert sequence contig bacm.pk155.l13.fis17"
tgaagaagatagtgtcagacagaggaacacagttcacctctcatttttggcagcagctgcatgaagccttgggcacacatctgaatttcagttcatcatatcatccgcagacagatggtcagactaaaaggaccaaccaaattcttgaagacatgtagagagcctgtgtgttgcaagaccagtccggatgggacaagagattgccttatgcagagttttcctataacaacagttactaggccagcttgaagatgtcaccatttcaggcgctttatggaaggagttgtagaactccgttgcaatgggatcagcctggagaaaagcaagtgttcgggccagacattcttcttgaagccgaagagaacatcaagatggttcgagagaatctgaagatagcgcagtcaagacaacgaagttatgcagacacaagaagaagagagctgagtttcgaagtcggagacttcgtctatctaaaagtgtcaccgatcagaggagtctgaaggttcggagtcaaaggcaagctagcaccccactacattggtccgtaccaaattctctcaaggcgtggagaagtggcctatcaacttagtctgccagagaatttgtctgctgtgcatgatgtctttcatgtgtctcagttgaagaagtgcttgcgtgtgccggaagagcagttgctagttgaaggtcttgaagtccacgagatcaaggtaatcgataccgtcgcctcgccctgtgtaataagacccactcgcccgataggagtcgtatacgggtc

SEQ ID NO: 454 - DNA, 1069 bp, Zea mays
  source: /note="Zea mays BAC clone full insert sequence contig bacm.pk155.l13.fis18"
ggcctccaccttagcttgatcaacttcaattccctgcggtgtcacaacatagccaagaaaagagacacggtctgtgcaaaatgtgcacttgtcaaggttaccaaataagcgtgcttcacgtaaagcattgaaaacagcacgtagatgatcaagatggtctactagacatttgctatagatcaagatgtcatcgaagtagacgaccacaaatcttccaatgaaagcacgtaaaacctcattcattaatctcatgaaagtactaggtgcattagtgagaccaaaaggcatgactaaccactcatacaaaccaaacttggttttaaacgccgttttccattcatcccctagcttcatgcgaatttggtgatatccactacgtaagtcaattttagagaaaatcattgagccactaagttcatccagcatatcatctaacctagggataggatgacgatatctgatggtaatgttattaattgctcgacaatctacacacatgcgccatgagccatctttctttgggactaataaaacagggacagagcaaggactaagggactcacgcacataacctttatcgagtaattcttgtacttgtcgctgaatctccttggtttcttccgggtttgtcctgtatggcgctcggtttggcaaggaagcccctgggatgaggtcaatctgatgctcaattcctcttatcggtggcaggccaggtggcacttcgtttggaaatacatcagcatattcctgcaaaatattagtgacagtagaaggcaaagtagatggtatgttgtgaagtgagaacaaagcatccttgcaaataaatacatagcagattgaagcaacatcatttaattcaagcaaatcagatttggaagcaagaaaacaagcacttttcagttgtatttctgtcttcctcacttgagtagatttagaattgtcactcttatgttgtaccaactcctttgcagcacctggatttttattatgaacagatttatttttctcttttgcagctctagcaacttcatccttcaaaatagcatcggaggacatggggtgcaatact

SEQ ID NO: 455 - DNA, 1231 bp, Zea mays
  VARIATION (1172)..(1172): /replace="c" or "g" or "t"
  misc_feature (1172): /note="Nucleotide given in the sequence has no preference with respect to those in the annotation for said position"
  source: /note="Zea mays BAC clone full insert sequence contig bacm.pk155.l13.fis19"
tggacctaaagtagtgcattgggaatgttcgttgcgaaaaacaaagaaattgatccggtgggaaaaactcgtgctttgtatgcaccgcgacacccgttttcggaacgggtgacgtgcgacaacgaatttgcgcgaaaccacccgaaacatgagttttggaccaaaattagtggattgggcatgttcgttgcgtaaaatgaagaaattgatccggtggcaaaactcgtgctttctatgcaccccgacacccgttttcggaatgggtgacgtgcggcaacgaaattgcgcgaaaccaccccaaacatgagttttggacataaattagtggattgggcatgttggttgcgaaaaacgaagaaatggttccggtggcaaaaactcgtgcttgtatgcaccccgacacccgttttctgaatgggtgacgtgcggcaatgaaattgcgcgaaaccaccccaaacatgtgttttggacccaaagtactggattgggcatgttcgttgcgaaaaacgaagaaatgtttccggtggcaaaaaaactggtgcttgtatgcacgctcgacacccgttttcggaatgggtgacgtgcggcaatgaaattgcgcgaaaccaccccaaacatgagttttggacctaaagtagtggattgggcatgttcgttgcgaaaaacgaagaaatggttctggtggcaaaaactcgtgcttgtatgcaccctcgacacctgttttcggaatgggtgacgtgcagcaacgaaattgcgcgaaaccaccccaaacatgagttttggacctaaagtagttgattgggcatgttcgttgcgaaaaacgaagaaatggttccggtgccaaaactcgtactttgtacgcaccccgacaccccgtttttggaatgggtgacgtgcggcaacgaaattgggcgaaaccaccccaaacatgtgttttggacctaaagtagtggattgggcatgttcgttgcgaaaaacgaagaaatggttccggtggcaaaaactcgtgcttgtatgcacgctcgacacccgttttcggaatgggtgacgtgcggcgacgaaatttcgcgaaaccaccccaaacatgtgttttggacctaaagtagtggattgggcatgttcgttacgaaaaacgaagaaatggttccggtggccactcttgcgtaacgataccgtcgccatggcaaagcataaaaaaacgcacttcgccctatagtagtcgatagccgtc

SEQ ID NO: 456 - DNA, 554 bp, Zea mays
  source: /note="Zea mays BAC clone full insert sequence contig bacm.pk155.l13.fis20"
tggaaagaaccacttctatgctgcgatctagagtgagatttgttaaagatagtgatgctaatacttctttcaagcacaagctacattcaggacaaggaagaatttcatccataatctggtggttaatgaccaactacttacttcccaagttgatgtaatgccccgaattttagagttgaatttttttctttcactcgctaaattcgggcgttacctctctttcccatttcttttcgctaaaaccctacccatttccaaaactctatgtcgtgtgataatagtaaaccctagaaatattttctttggttgttgcatcatgccgatccacgcatcaatttcccttgtgagtatttgcttgatttccataaagtatgcacttagtagagggttagagggaaatggataatgggaaatagggaaataaatagaatagggaatttccccctcccccctcttgggtcggcttccagccgcggcccagccggctaccagccgtggcctgccccgccccccctcggcccagatcgccccccccctcccgggcaaggtaaagg

SEQ ID NO: 457 - DNA, 989 bp, Zea mays
  source: /note="Zea mays BAC clone full insert sequence contig bacm.pk155.l13.fis21"
acgagtttttgccaccggaaccatttcttcgttttttgcaacgaacatgcccaatccactactttaggtccaaaactaatgtttggggtggttttgcgcaatttcgttgccgcacgtcacccattccgaaaacggatgtcggggtgcatacaaacaccaatttttgccacccaaaccatttctttgttttttgcaacgaacatgccccatcctctactttaggtcccaaacacatgtttggggtgggttcgcgcaaattcatttgcgcacgtcacccattcccaaaacgggtgtcggggtgcatacaaagcacgagtttttgccaccgaacccatttcttcgtttttcgcaacgaacatgcccaatccaatactttaggtccaaaactcatgtttggggtggtttcgcgcaatttcgttgtcgcacgtcacctattctgaaaacgggtgtcggggtgcatacaagacgagtttttgtcaccggaaccatttcttcatttttcgcaacgaacattcccaatccactactttaggtccaaaacacatgtttggggtggtttcgcgcaatttcattgtcccacgtcacccattccgaaaacgggtgtcggggtgcatacaagcacgagtttttgccaccggaaccattttttcgtttttcgcaacgaacattcccaatccactactttaggtccaaaacacatgtttggggtggtttcgcgcaatttcgttgtcccacgtcacccattccgaaaacgggtgtcggggtgcatacaagcacgagtttttgccaccggaaccatttcttcgtttttcgcaacgaacatgcccaatccactactttaggtccaaaactcatgcttggggtggtttcacgcaatttcgttgccgcacgtcacccattccgaaaacgggtgtcggggtgcactcaatcaaggtttcgatcctcgcccgacggttgaatgtcccaatccccgaaggagtgttacgggc

SEQ ID NO: 458 - DNA, 687 bp, Zea mays
  source: /note="Zea mays BAC clone full insert sequence contig bacm.pk155.l13.fis22"
caacattagcatatgatgcatatggaatgcagtatagtacttatatgcatctgatgtattggggaaacatatgtaggaatatcttgtcataactcataatgctaatgtacagtactcataatgcaataaggctcagctgagcagccttacacatcccccatttctttagtctataaaacatacataacatttcgtaatgtgttatgttcgttttatggtctatcgagcatttaggcatttttctaacagtataaattgtactatgataaatcatcaaagcttatatgcttatgcaagatatatgaaactaattggctacatatattgttctagtattcacacacccacttgtagcccaaccatgtgcttcccgcccccttcccctctccctggcgcttcagccccctagagccacacgtcgtcacctgctccagacacgacggctacaccccttccctccctcccctaagtttgtccccgctggcaagttcaaggcccaatgttggaacgatgaagacgattcctccatcgatggttcctagggctatatctggtcacaagcttcatataaggacgtgtcggtttcatcaagccctcccgtcccgcccagtgctctattcctagagatgatggcggaaactaggtaaaggctgaaaatcgtcgtgctcgtccgcgtcgccctcgcct

SEQ ID NO: 459 - DNA, 670 bp, Zea mays
  source: /note="Zea mays BAC clone full insert sequence contig bacm.pk155.l13.fis23"
tgactccaccagaattccttcttcctatttctctatttaagcaactagcagccaccaaagaacttgggttttgtttgatgtaagtttagcctttgctacttccttgtaaacgcgtgtgtcggctagaccacccgaatacttgaaacgggaccccaactttatcagatccgtgcgtgtttgcttgttatcttgttcttgcttgttctcgattgcttgcaggttcaaggctgttcttggcacggcaagagcagcaacaacaggagccggtgtaactatcgctaaggcgcaacacccttgtggttgttgtagtcggatagcacaacgttgacctccaccccaaatcgtagttatcaggagacggtgtacctgttgctcaaggcgccacaccatcttggttgtggtagtcgggcagccaacgtcgttctccaacaagttttccacctccatcatctctcatcgaaagatcgggcacccttctacccgttgggttcatcactattcataaggccccgtatcgaatggctccaaaagagcagattgcattaaagcggcaattggatgatctgctggctaagggcttcattaggcctagcaggtctccatgggcttccccagtattgtttgttgagaaagaagataaaagcaagcggctgtgtgtggatatcgcgct

SEQ ID NO: 460 - DNA, 911 bp, Zea mays
  VARIATION (571)..(572): /replace="c" or "g" or "t"
  misc_feature (571)..(572): /note="Nucleotides given in the sequence have no preference with respect to those in the annotations for said positions"
  source: /note="Zea mays BAC clone full insert sequence contig bacm.pk155.l13.fis24"
tcccatatacttttgtggagcgaggttagatgaaatcgcattaaatcgctccacctagcgtaatcttcaccatcaaaggttggtggtttgcctaatgggacggaaagtaaaggtgtatgtttggaaatgcgagggtagcgtagggggatcttactatacttcttgcgctcttggcgcttagaagtgacgaagggcgcatcggagtcggaggtcgatgttgatgaagtgtcagtctcgtagtagaccaccttcctcatcctcttgtgcttgtcgcctttccgacgcgacttgtgggaagaagatttttccttcttctctttgtggtgagaagaggaagatcttttctccttccgtttggaggagtccttcttcttctccttcctcttggtgcgggactcttccgatgaagtgctcccgtggcttgtagtgggcttttcgccggtctccatctccttcttggcgtgatctcccgacatcacttcgagcggttaggctctaatgaagcaccgggctctgataccaattgatagtcgcctagagggggggtgaatagggcgaaactgaaatttaaacaatataacaccactaccagccggggttagcgttagaaatataaacgagtccacgagaaagggcggcaaacaatcgccagcaaataatgaagtgagacccacggatttggttttaccgaggtttcggtctttgcaaccttaatccccgtttaaggaggccacaaagggccggttttcttttaaacctttccctcttttaaaagggtcccttggaacccagtgagcctctctttccaaatccctttgggattcaaatttccccaaggcccccccccccaaatgggcccccttgcccttttttcaaaggggggggtttgattcccaaaaagaatcccgaat

SEQ ID NO: 461 - DNA, 676 bp, Zea mays
  source: /note="Zea mays BAC clone full insert sequence contig bacm.pk155.l13.fis25"
gaattgtgatggaataagtcttgagcatctagaggacaacagtcgcttttgactgtcctctgtagtccttgagcatctagaggacatcagtcgcttttgactgtcctctgtagtcctttagcatctagaggatagcttgactgtcctctgtagtctctttagcatctataggacaatcctgctgtgtagtgtgtgtgagaaggtgtggtagtgcagcctctagggctataaatatgggtctccaacccttagatgggtatgacattgtgtagtgtttgaggaaataaacagaaaattgccccaactcatagtgtcatcctcttgatgagagttagagtccctctacttacaattggtatcagagccaaactatcctgcagcctaaacatctcgtgctcatctccttcccgcgcctctccccacactcagtcggcagcaagagctccaactgttccttcctcccctgctcagacgagcagcctttcgtctgagacagcctcttccacacgcagcgacccctcactagcccaccatgtccctacgctcggccacttcgagtgcgcggcgccagcaggaggccgaggtcgccgcggcacaagaacgcgagcgagcagcagcagcggctgcagcgacagcgacgagggcagcacggttggcggcggcggaactggcagcg

SEQ ID NO: 462 - DNA, 682 bp, Zea mays
  source: /note="Zea mays BAC clone full insert sequence contig bacm.pk155.l13.fis26"
aggaggtcctcttgggaatccaaaaggtcatccttttcatgaatagcactaaccaattcatttaatttttccttttgagctatgttaaggttggcaaaaagggaacgcaaattatcttcctcatcactagcattgtcatcactagaggattcatatttagtggaggatttagatttaaccttctttttgccgtcctttgccatgaggcacttgtggccgacgttggggaagaggagtcccttggtgacggcgatgttggcggcgtcctcgtcgtcggatgagtcgcttgagctttcgtcggagtcccactcccgacaaacatgggcatcgccgcccttcttcttgtagtatctcttcttctcctttcgcctccccttcttgtcgtcacctcggtcactgtcactggatataggacatttagcaataaaatgaccgggcttaccacacttgtagcaaaccttcttggagcgggatttgtaatccttccccctcctttgcttgaggatttgacggaagctcttgatgacgagcgtcatttcctcattgtcgagcttggaggcgtctattggttgccgacttggtgtagactcctccttcttctcctccgttgccttgaatgcaacgggttgagcttcggatgtggtggcatcatcaagctcgttgatcttcctcgagccttcga

SEQ ID NO: 463 - DNA, 1056 bp, Zea mays
  source: /note="Zea mays BAC clone full insert sequence contig bacm.pk155.l13.fis27"
gaagaaatggttccggtggcaaaaactcgtgctttgtatgcacagcgacacccgtttttggaatgagtgacgtgcggcaacgaaattgcgcgaaaccaccccaaacattagttttgtacctaaagtagtggattgggcatgttcgttgtgaaaaacaaagaaatggttccggtggcaaaaactcgttcttgtatgcaccccgacacccgttttcggaatgggtgacgtgcggcaacgaaattgcgcgaaaccactccaaacatgtgttttggacctaaagtagtggattgtgagtgttcgttgcgaaaaacgaagaaatggttccggtggcaaaaactcgttcttgtatgcacccgttttcggaatgggtgacgtgcggcaacgaaattgcgcgaaaccaccccaaacatgtgttttggacctaaagtagtggattgggcatgttcgttgcgaaaaacgaagaaatagttccggtggcaaaaactcgtgcttgtatgcaccccgacacctgttttcggaatgggtgacgtgtgacaacgaaattgcgcgaaaccaccccaaacatgtgttttgacctaaagtagtggattgagaatattcgttgcgaaaaacgaaataatgggtccggtggcaaaaactcgttcttggatgcaccccgacacccgttttcggaatgggtgacgtgcggcaacaaaattgtgcgaaaccaccccaaacatgtgttttggacctaaagtagtggattgggcatgttcgttgcgaaaaacgaagaaatggttccggtggcaaaaactcgtgctttgtatgcaccgcgacacccgctttcggaatgagtgacgtgcgacaacaaaattgcgcgaaaacaccccaaacatgagttttggaactaaagtagtggattgggcatgttctttgccaaaaacgaagaaatggttctggtggcaaaaactcgtgctttgaatgccccccacacccctttttcggaagtggtggacgggcgaccaaccaattgccccaaaaccccccaaacattaatttttgggacctaattagagg

SEQ ID NO: 464 - DNA, 1605 bp, Zea mays
  VARIATION (1576)..(1576): /replace="c" or "g" or "t"
  misc_feature (1576): /note="Nucleotide given in the sequence has no preference with respect to those in the annotation for said position"
  source: /note="Zea mays BAC clone full insert sequence contig bacm.pk155.l13.fis28"
tacttatgcccaaagggaaagatagtcctgcgagggctctaatgatccgttttttggcgattcatgccaaaggggagaaagtctgagccccaagcaaaaggaccgcttcacccccattttcaaaaacttagtgttttccaaaagtatttatcaattggtattctatcgtgtgcaaaaagaagaaagtagtgtttcaaaaataatatatcaaaaccctcttgaacactaagaggtggatctcctgtagggggagttttgtttagtcaaaggaaaagcatttgagacagggggagaaaatttcaaatcttgaaaatgctctgctaaactcttattcatttacctttgactgtttgcaaaagaactttgaaaaagatctacaaaagagtttgcaaaaacaaaacatgtggtgcaagcgtggtccaaaatgttatataataaagaaacaatccatgcatatcttgtaagtatttaaattggctcaattccaagcaacctttacacttacattatgcaaactagttcaattatgcacttctatatttgctttggtttgtgttggcatcaatcaccaaaaagggggagattgaaagggaattaggcttacacctagtccctaattaattttggtggttgaattgcccaacacaaataatcggactaactagtttgcccaagtgtatagattatacaggtgtaaaaggttcacactcagccaataaaaagaccaagttttggattcaacaaaggagcaaaggggcaaccgaaggcacccctggtccggcgcaccggactgtccggtgtgccaccggacatgtccggtgcaccaggggaacttagactcaaactctccaccttcgggaattcccagaggcgactcgactataattcaccggactgtccggtgtacaccggacagtgtccggtgcgccaagggaggtcggcctcaggaactcgccagcttcgggaaaagccaacggctcgtccactataattcaccggactgtccggtgtgcaccggactgtccggtgcgactccggggcaacggctatctccgcgccaacggctctctgccgagcaataaatgcgcgcgcagcgcgcgcagaagtcagaatcgcccatgctggcacaccggacagccaacagtacctgtccggtgtgcaccggacaccaaggcgggcccacaagtcagaagctccaacggtcagaatccaacggcagtgatgacgtggcaggggggcaccggactgtccggtgtgcaccggactgtccggtgcgccatcgagcagacagcctcccaacgaccacttttggtggttggggctataaatacccaaaccaccccaccattcattgcatccaagttttccacttcccaactactacaagagctctagcattcaattctagacacaccaaagagatcaaatcctctccaattccacacacaaaaccctagtgactagagagagtgatttccttgtgttctttcgagctcttgcgcttggattgctttcttctatcttgattctttcttgtgatcaaaaactcacattgtaatagaggcaagaggcaccaattgtgtggtggccccttgcgggaagttg

SEQ ID NO: 465 - DNA, 1019 bp, Zea mays
  source: /note="Zea mays BAC clone full insert sequence contig bacm.pk155.l13.fis29"
aacgggtgtcgcagtgcatagaaagcacgagtttctgccaccggaaccatttcttcgtttttcgcaacgaacatgcccaatccactactttaggtccaaaactcatgtttggggtggtttcgcgcaatttcgttgctgcacgtcacccattccgaaaacgggtgtcgggggtgcatacaagcacgagtttttgccaccggaaccatttcttcgtttttcgcaacgaacatgctcaatccacttctttaggtccaaaactcatgtttggggtggtttcgcgcaatttcgttgccatacgtcactcattccgaaaacgggtgtcgcagtgcatacaaagcaggagtttttgccaccggaaccatttctttgtttttcgcaacaaacatgcccaatcaactactttaggtccaaaacacctgtttggggtggtttcgcgcaattttgttgctgcacgtcacccattccgaaaacgggtgtcgggatgcatacaagcacgagtttttgccaccggatccatttcttcgtttttcgcaacgaacatgcccaatccactactttagttccaaaactcatgtttggggtggtttcgcgcaatttagttgccacacgtcactcattccgaaaatgggtgtcggggtgcatacaaagcacgggtgtcggggtgcatacaagcacgagtttttgccaccggaaccatttctttgtttttcgcaacgaacatgcccaatccactaatttaggtccaaaactcatgtttggggtggtttcgcgcaatttcgttgctgcacgtcacccattccgaaaacaggtgtcggggtgcatacaagcacaagtttttgccaccggaaccatttcttcgtttttcgcaacgaacatgccaatccactactttcggtccaaaactcatgtttggggtggtttcgcgcaatttcgttgccgcacgtcacccattccatcaagcgtacgatcctcgcctcggcgggtttgagtaccattccccatagtgagtgttagcggtc

SEQ ID NO: 466 - DNA, 938 bp, Zea mays
  source: /note="Zea mays BAC clone full insert sequence contig bacm.pk155.l13.fis30"
ctgaaccatttcttcgtttttcgcaacgaacattcccaatccaatactttaggtccaaaactcatgtttggggtggtttcgcgcaatttcgttgtcgcacgtcacctattccgaaaaagggtgtcggggtgcatacaagcacgagtttttggcaccggaaccatttcttcgtttttcgcaacaaacatgtccaatcaactactttaggtccaaaactcatgtttggggtggtttcgcgcaatttcgtggccgcacgtcacccattccgaaaatgggtgtcggggtgcatacaagcacgagtttttgtcaccggatcaatttcttcgtttttcgcaacgaacatgcctaatccactactttaggtccaaaactcatgtttggggtggtttcgcgcaatttcgtggctgcacgtcacccattccgaaaatgggtgtcggggtgcatacaagcaccaagtttttgcaccgaaaccatttttttgtttttcgcaacgaacatgccccatcctctactttaggtccaaaacacatgtttggggtggtttcgcgcaatttcattgccgcacgccacccaatccgaaaacgggtgtcggggtgcatacaaagcacgagtttttgccaccggaaccatttttacgtttttcgcaacgaacatgcccaatccactactttaggtccaaaactcatgtttggggtggtttcgcgcaatttcgttgtcgcacgtcacctattctgaaaacgggtgtcgggtgcatacaaggacgagtttttgccaccggaaccatttcttcatttttcgcaacgaacattctcaatccactactttaggaccaaaacacatgtttggggtggtttcgcgcaatttcgttgtcgcacgtcacccattccgaaaacgggtgtcggggtgcatacaagcacgagtttttgtcaccgcgcaac

SEQ ID NO: 467 - DNA, 1035 bp, Zea mays
  source: /note="Zea mays BAC clone full insert sequence contig bacm.pk155.l13.fis31"
gacggcgaaacgactcctatgggcgaattgggacaattacaaccgcgaggtcgacggatcgataccttgatgaagaaatagttccggtggcaaaaactcgtgcttgtatgcaccccgacacctgttttcggaatgggtgacgtgtgacaacgaaattgcgcgaaaccaccccaaacatgtgttttgacctaaagtagtggattgagaatattcgttgcgaaaaacgaagtaatggttccggtggcaaaaactcgttcttggatgcaccccgacacccgttttcggaatgggtgacgtgcggcaacgaaattgtgcgaaaccaccccaaacatgtgttttggatctaaagtagtggattgggcatgttcgttgcgaaaaacgaagaaatagttccggtggcaaaaactcgtgctttgtatgcaccccgacacccgttttcggaatgcgtgacgtgcggcaacaaaattgcgcgaaaccaccccaaacatgagttttggacctaaagtaatggattgggcatgttcgttgcgaaaaacgaagaaatggttccggtggcaaaaactcgtgctttgaatgcaatccaacacccattttcggaatgggtgacgtgtggcaacgaaattgcgcgaaaccaccccaaacatgtgttttggacctaaattagtggattgggcaagttcgttgcgaaaaaagaagaaatggttccgatggcaaaaactcgtgctttggatgcaccgcgacacctgttttcagaatgggtgacgtgcggcaacgaaattgcgcgaaaccaccccaaacatgagttttggacctaaattactggattgggcatgttagttgcgaaaaacgaagaaatggttccgatggcaaaaactcgtgctttgtagcaccccgacacccgttttcggaatgggtgacgtgcggcaacgaaattgcgcgaaaccaccccaaacatgagttttggacctaaagtagtggattcggcatgttcattgcaaaaaacgaagaaatggttccggtggcaaaaactcgtgc

SEQ ID NO: 468 - DNA, 1170 bp, Zea mays
  VARIATION (1110)..(1110): /replace="c" or "g" or "t"
  misc_feature (1110): /note="Nucleotide given in the sequence has no preference with respect to those in the annotation for said position"
  VARIATION (1126)..(1126): /replace="c" or "g" or "t"
  misc_feature (1126): /note="Nucleotide given in the sequence has no preference with respect to those in the annotation for said position"
  source: /note="Zea mays BAC clone full insert sequence contig bacm.pk155.l13.fis32"
tccaaaactcatgcttggggtggtttcgcacaatttcgttgctgcacgtcacccattccgaaaacgggtgtcggggtgcatacaagcacgagttttggccactggaaccatttcttcgtttttagcaacgaacatgcctaatccattactttaggtccaaaactcatgcttggggtggtttcgcataatttcgttgctgcacgtcacccattccgaaaacgggtgtcggggtgcatacaagcacgagtttttgccaacggaaccatttcttcgttcttcgcaacgaacatgcccaatccactactttaggtccaaaacacatgtttggggtggtttcgcgcaatttcgttgccgcacgtcacccattccgaaaacgggtgtcggggtgcatacaagcacgagtttatgccactagaaccatttctttgtttttcgcaacaaacattcccaatccagtaatttaggtacaaaacacatgtttggggtggtttcgcgcaatttcggtgccgcacgtcacccattctgaaaacaggtgtcgcggtgcatacaaagcgcgagtttttgccaccggaaccatttcttcatttttcgcaacgaacatgcccaatccactaatttaggtccaaaactcatgtttggggtggtttcgcgcaatttcgttgccgcacgtcacccattccgaaaatgggtgttggattgcattcaaagcatgagtttttgccaccggaaccatttcttcgtttttcgcaacgaacatgcccaatccactactttaggtccaaaactcatgtttggggtggtttcgcgcaatttcgttgccgcacgtcacccatttcgaaaacgggtgtcggggtgcatacaaagcacgagtttttgccaccagaaccatttcttcgtttttcgcaacgaacatgcctaatccactactttaggtccaaaactaatgttggggatggttttgcgcaatttcgttgccgcacgtcacttatttcgaaatgggtgtcggggtgcatacaaagcacgagtttttgccactggaaccatttcttcgtttttcgcaacgaacatgcctaatccattactttaggtccaccctcttgcgtaacgataccgtcgacctcgacaaagctaaagggacgccacttcccctgataggagtcgttacgcgtc

SEQ ID NO: 469 - DNA, 933 bp, Zea mays
  source: /note="Zea mays BAC clone full insert sequence contig bacm.pk155.l13.fis33"
caaaactccaccctcgagtaatagattagattgctcgcatctttttcttgttcgttcttcgattgtgcacaggaaacgatcttcgtgatcaggccgatctcgcatcagcaaggtcggtaaccacagggagttggttcagcgattgcattggcgcctcgggcttgctcgtcgtagtcggatcgcaagggtcatcttccgccaaatcggaattatctctactcgccgaaagattgggcacctcagcttcatcaattggtatcagatttccaggttgatcggtgagtttatcgagcgttttttttcctacagtccacaaaaccacatgaaaattcaggttagatcttatcccagcaccttttgagcctcgcactttctttcaataatctgcattgttgaatttgtgtgctttcgcgtcatttgttgctggttgcattgtgttcttccaccattcaaaccctagcgccgccaccatctcccgtttgatcacgccacaaaccgagtcaacgactgtttccttgattttctccttcggttacgtcaaaaaaaaaaaaacagaaaaaacaaaccgagtcaacgaccgtttccttgattttctccttcggttacgaaaaaaaaaacagaaaaaaaaacataccgagtcaacggccgcttccttgtttttctccttcggttacgtaaaaaaaaaacaaaaaaaaaaagataacgaaggagaaaggatacagttgcttcattccggtcgtttttagaacataacttgaggtaccttccgtaaaacgggcataacttttcgctcgggtgtccaaaaaatctgaaatttttacaggagcttgttgacaccattctgagcccggccaaactcacttcggtctgtttgggttcgacaaaattgtcaaaaaaattcaggaaaataaagaaaaaaatccgtcaaagttc

SEQ ID NO: 470 - DNA, 1126 bp, Zea mays
  source: /note="Zea mays BAC clone full insert sequence contig bacm.pk155.l13.fis34"
cgtgttgtcctctgtgaatcaaaactccacctcgagtgatattaagataactcgcatctttttcttgttcgttcttcgattgtgcacaggaaacgatcttcgtgatcaggccgatctcgcatcagcaaggtcggtaactattggaagttggttcagcgattgcattggcacttcgggatcgctcgtcgtagtcggatcgtgagggtctacttccaccaaatcagaattatctccactcaccgaaagatcgggcactccagctctatcagttttcccgggcggtcatccaacgaacaggtccttacggagaggcactcgagaaaccgctcgagcccccttaaatgccacaagtataacatcataatagaaaagggaaacaatgtatcattgataattctcatcatgttcattgattagtgttgagcaatagcataaagctaaacaataataatccaactcaaataggtgaacaaggacatggataacgaaagctagtcaatccttaggtacaattgtgtaaatgcgggaagtgaattatagaatgcataggacaaagataggtcaagggacacttgcctccaccaaccagctgctgctcaggggcttctcctgcgagttcttcgggctcctcaaccagatcgttctctatgcgagcgcaaacatacatacatccatccattcgaattaggaaaataaacagtacaccatacaagagagcagataagtcaaatatgcataagatgtgacatacgatattgcattcgtcatggctagaaagagaagaaggaaggtctcgcagtggttaaagctataatcgaagcgtattacggatagatgcataactaatcattatgtgatctagttccacctagttacactaacgagtattagtcacatgcactaatataattataaccattttcaattgatcaacattaaacaaggtcaatgattaactacatgaaataactaacgtaaccaatttctaaatcgagttcccatttattgatataaataacgcgatcactacgcatgagaataccggggggaagacaggcacgtcttggggttgactaacgcgtcgagggcaccgtgagtcgtgccaaagcccctgccgccccctcgt

SEQ ID NO: 471 - DNA, 993 bp, Zea mays
  VARIATION (843)..(843): /replace="c" or "g" or "t"
  misc_feature (843): /note="Nucleotide given in the sequence has no preference with respect to those in the annotation for said position"
  source: /note="Zea mays BAC clone full insert sequence contig bacm.pk155.l13.fis35"
gaggcttgttgaaaacgctgcattttgttaagcaaatcacgagcataatagaaaggaacaaatctgtggcgcatggcagtttttaattgggtccaagtaatgacactgttaatgggaagtttttgtttatactcacgccaccaaattaaagcaaaatcagtaaattcactaatgacagccttcacttggctattagcaggaatatcatggcatgaaaatttctgttctacctctaattcccaatcaagatatgcagcaggatcatatttaccattaaaagatggaattttaaatttaatcttagaaaataagtcattagggggatgacgaaccacacgacgtgcacgaccacggcgatctccatcgtcctgctcagtgtcaccgccgtattcttgctccatctttgtggtcaatgcatcaaggcgtgccaggatggtgtcgagtgtggtgcgagtcgctgtttgagcaaggtcaagttggttgaaacgctcggtcgtcgaagtgatcgttgaatcaagtcgttcatgcatcgtcctaatgtcggcagcaagtccatcaacttgtccccttacttcctgcaactgggcatccaccatgtcgtgtgctcctgccatagttagcgcaaacaccaaaaggagaaaaaccaacgacaaaaacaggggtgtactgctcacaaggcgctcacactagtgctgttatcaagttcttatccgttcttaccaagccacagtggtgaaccgcaatcaacaggtggaaccggtgaaagattggatgagcgattgcgtggagaaacagaaacctgctcgtcgtagaaatatgtggagttgtgggtaggttgcactacagtcaaggattagcacgatcaaacataatgcaaagtttgaattatagtgcaaacacgaaactatattgctggccacagtgccaaagatggatggactagtagatgccagtaccgtaaatattgtactagtgatgccaaaaagcactagt

SEQ ID NO: 472 - DNA, 993 bp, Zea mays
  source: /note="Zea mays BAC clone full insert sequence contig bacm.pk155.l13.fis36"
cacgtgctgattttgatgatctccatgaagctcatatgccctgttatgcacttgtatgctcacgcatgcttgttccgcttgatgatgcaccgtctttggatataccccctgctgttgttaaccttttgcaggagtatgcttgatgaggacatcattatgagtagttcataatgctcccagcggaaatttggtttatataaatggttggttatgccatttggattgactaatgctcccagcacctttatgcgtttaatgaacgaagttctacgagccttcataggtttgtttgttgttgtttatttcgatgatatccttatttacagcaagtctatagaggagcatttagaacatttgcgtgctgtttttgatgctttgtgtgctgctcgcttgtttggtaacatggaaaagtgcacattttgcacgcaacgtgtctcgtttcttggttatgtggttactccgcagggcattgaggtagatagcagcaagattgctgccattcgggagtggcctacaccgacaacggtcacacaaattcggagctttcttggacttgccggtttctaccgcagatttgttcgtgattttagctccattgcagcgcctctacatgagcttacaaagaaagatgtgccgtttgcttggagtgattcgcaggaggtagcgttcagcactttgaaagataagttaacccaagctcccctcttgcaattgcctgattttaataaagtttttgagcttgaatgcgatgctagcggtattgggctaggtgctgttttgttacaagaaggaaaacagttgcttattttagtgaaaaattaagcggtgctagtctgaaatattctacttatgataaggagctttacgctttagtgcgcactttgcatacatggcagcactatctttggcatcgtgagtgatgcggacatcacaccaacacgagcacatttacacagcagcactttctcaagccaggggccacccctccaccgg

SEQ ID NO: 473 - DNA, 1371 bp, Zea mays
  source: /note="Zea mays BAC clone full insert sequence contig bacm.pk155.l13.fis37"
gaagaatagttccggtggcaaaaactcgtgcttgtatgcaccccgacacctgttttcggaatgggtgacgtgtgacaacgaaattgcgcgaaaccaccccaaacatgtgttttgacctaaagtagtggattgagaatattcgttgcgaaaaacgaagtaatggttccggtggcaaaaactcgttcttggatgcaccccgacacccgttttcggaatgggtgacgtgcggcaacgaaattgtgcgaaaccaccccaaacatgtgttttggacctaaagtagtggattgggcatgttcgttgcgaaaaacgaagaaatagttccggtggcaaaaactcgtgctttgtatgcaccgcgacacccgcttttcggaatgcgtgacgtgcggcaacaaaattgcgtgaaaccaccccaaacatgagttttggacctaaagtaatggattgggcatgttcgttgcgaaaaacgaagaaatggttctggtggcaaaaactcgtgctttgaatgcaatccaacacccattttcggaatgggtgacgtgcggcaacgaaattgcgcgaaaccaccccaaacatgtgttttggatctaaagtagtggattgggcatgttcgttgcgaaaaacgaagaaatagttccggtggcaaaaactcgtgctttgtatgcaccgcgacactcgttttcggaatgcgtgacgtgcggcaacaaaattgcgcgaaaccaccccaaacatgagtcttggacctaaagtagtgaattgggcatgttcgttgcgaaaaacgaagaaatggttccggtggcaaaaactcgtgcttgtatgcaccccgacgcccgttttcggaatgggtgacgtgcggcaacgaaattgcgcgaaaccaccccaaacatgggttttggacctaaattagtggactgggcatgttcgttgcgaaaaacgaagaaattgatccggtggcaaaaactcgtgatttgtatgcaacccgacacctgttttcggaaggggtgacgtgcggcaacgaaattgcgcgaaaccaccccaaacatgagttttggacctaaagtagtggattgggcatgttcgttgtgaaaaacgaagaaacagtttcggtggcaaaaactcgtgctttgtatgcaacccaagacccattttcggaatgagtgacgtgcggcaacgaaattacgcgaaaccaccccaaacatgagttttggacctaaagtagtggattgggcatgtttgttgcgaaaaacgaagaaattgatccggaggcaaaaactcgtgctttgtatgcaccccgacacccattttcggaatgggtgaccggcaacgaaattgcgcgaaaccaccccaaacatgtgttttggaccaaaagtaatg

SEQ ID NO: 474 - DNA, 987 bp, Zea mays
  source: /note="Zea mays BAC clone full insert sequence contig bacm.pk155.l13.fis38"
ttgctgcacgtcacccattccgaaaacgggtgtcggggtgcatacatgcacgagtttttgccaccggaaccatttcttcgtttttcgcaacaaacatgtccaatccactactttaggtccaaaactcatgtttggggtggtttctcgcaatttcgttgccgcacgccactcattccgaaaatgggtgtcgggtgcatacaaagcacgagtttttgccaccggaaccatttcttcgtttttcgcaacgaacatgcccaatccactactttaggtccaaaacacctgtttggggtggtttcgcgcaatttcgttgctgcacgtcacccattccgaaaacgggagtcggggtgcatacaagcacgagtttttgccaccggaaccatttcttcgtttttcgcaacgaacattcacaatccactactttaggtccaaaactcatgtgtggggtggtttcgcgcaatttcgttgccgcacgtcactcattccgaaaacgggtgttgggtgcatacaagcacgagtttttgccaccgaaaccatttctttgtttttcgcaacgaacatgcccaatccactactttaggtccaaaacacatgtttggggtggtttcgcgcaatttcgttgtcgcacgtcacccattccgaaaacgggtgtcggggtgcatacaaagcacgagtttttgccaccggaaccatttcttcgtttttcacaatgaacatgcccaatccagtactttaggtccaaaactcatgtttggggtggtttcgcgcaatttcattgccgcacgtcacccccaaattcagggcgttagaaaagaagaaaaaaaaattctacccccaaattcagggcgttacaaacctatcccccttaaaagaatctcgccctcgagattcagggttggctagcaaagagctcagggtatttggccatcagatcattttcacgctcccaggttgcttcttcctcagagtgatgactccatctgactt

SEQ ID NO: 475 - DNA, 1074 bp, Zea mays
  source: /note="Zea mays BAC clone full insert sequence contig bacm.pk155.l13.fis39"
tgtatgcaccccgacacccgtttttggaatgggtgacgtgcggcaacgaaattgtgcgaaaccaccccaaacatgtgttttggacctaaagtagtggattcagcatgtttgttgcgaaaaacgaagaaattgatccggtggcaaaaacccgtgctttgtatgcaccccgacacccattttcggaatgagtgacgtgcggcaacgaaattgcgcgaaaccaccccaaacatgagttttggacctaaattagtggattgggcatgttcgttgcaaaaaacgaagaaatggttctggtggcaaaaactcgtgcttgtatgcaccctcacacccgttttcagaatgggtgacgtgcggcaatgaaattgcgcgaaaccaccccaaacatgagttttggacctaaagtactggattgggcatgttcattgtgaaaaacgaagaaatggttccggtggcaaaaactcgtgctttgtatgcaccccgacaccgttttcggaatgggtgacgtgcgacaacgaaattgcgcgaaaccaccccaaacatgtgttttggacctaaagtagtggattgggcatgtacgttgcgaaaaacgaagaaatggttccgggtggcaaaaactcgtgcttgtatgcaccccgacacccatttttggaatgggtgacgtgcggcaacgaaattgcgcgaaaccaccccaaacatttgttttggacctaaagtagtggattgagcatgttcgttgcgaaaaacgaagaaatggttccggtggcaaaagctcgtgcttgtatgcaccccgacacccgtgctttgtatgcaccccgacacccattttcggaatgggtgacgtgtggcaactaaattgcgcgaaaccaccccaaacatgagttttggacctaaagtagtggattgggcatgttcgttgtgaaaaacgaagaaatggatccagtggcaaaaactcgtgctttgaatgcaccccgacacccgttttcggaatgggtgacgtgcggcaacgaaattgcccgaaaccaccccaaacatgagttttggacctaaattagtggattgggcatgttcgttgcg

SEQ ID NO: 476 - DNA, 1108 bp, Zea mays
  VARIATION (1024)..(1024): /replace="c" or "g" or "t"
  misc_feature (1024): /note="Nucleotide given in the sequence has no preference with respect to those in the annotation for said position"
  VARIATION (1064)..(1064): /replace="c" or "g" or "t"
  misc_feature (1064): /note="Nucleotide given in the sequence has no preference with respect to those in the annotation for said position"
  source: /note="Zea mays BAC clone full insert sequence contig bacm.pk155.l13.fis40"
cattgtaaagaaggaaggacatggaacaaatttgttctcactgatggctttgtgtttcgggctaacaaattatgcattccagctggttccgtgcgtatattattattacaggaagcacatggcggtgggttgatgggacactttggtgtgaagaagacagaagacatcctggccagccatttcttttggccgaagatgagaagagacgtggagcgatttgttgctcgctgcactacatgtcaaaaagctaagtctcaccttaattcacatggtttatacatgcctctcccagttcccagtgcaccatgggaggatatttctatggactttgttttaggactacctagaacaaagaaggggagggatagtatttttgttgttgtggacagattttcaaaaatggcacactttataccatgtcacaaaactgatgacgctacccatgttgctgatttgttctttcgtgaagttgttcgtttgcatggggttccaaacactattgtgtccgatcgggataccaaatttcttagtcatttttggaaaacgttatgggctaagttggaaactaaattgctcttttctactacttgtcaccctcaaaccgatggacaaaccgaagtcgtaaaccgtagtttatctaccatgcttagggctgttctgaaacataacatcaaattgtgggaagaatgtttgcctcatattgaatttgcttataatcgttctcagcattctacaactaaactatgcccttttaaaattgtgtatggttttgtccctcgtgctcctattgatcttatcgccatcccacattctgaaataatgaattttgatgcttctcgtcgtgctgaactgattataaagctgcatgaacaaactaaagcaaatattaaagccatgaatgctaagtatgaagaagcaggtagcaagggtagaaagcatattaccttttgaacctggtgatttagtatgggtgcatttaaggaaagatagattccctgatatgcgcaaatctaaatttacaccaagagctgctggacccttcaagtgcttcacaaaataatgaatatgcatataaagtcagttgcctgcagattttggggtcagttcc

SEQ ID NO: 477 - DNA, 812 bp, Zea mays
  source: /note="Zea mays BAC clone full insert sequence contig bacm.pk155.l13.fis41"
gaccgctatagactcctatagggcgaattgggttatattaactgcgcgcgaggtcgacggtatcttttcaccttgagtgtcatatttagcatttaaatcctcctactaccatatcgtgtagctttacaaaaaaagcccctaacaaaccacaattacacatacggttgaatctagatctcacggaccaaaaaaataattgcacacttgtacctaatgattgcttgcatattagtcactgtcaccctatatcaaagaacgtactataaaaaatatattaaaacatcatcggcttgagcaaactcaaggagagcagaaactcgagttcacgggcgatatggagggcgattctgacacacgtgatggagagggagagtgctcgggggaatcgtttgacccgacctaataactctgagcctcctgtaacacctctggtgtttagcatacttatatattgcatgtgcatcatgaaagcatcattaatcattcactacctatattagaatctagaattgtcacattgttgtgaagtgaactcctccttgaaccaataggaggcttatgtttcatggcaatggatcatcattgagtgcttgtgtgcatgagtaaaaccacctagataatctaggttgataatggttgatctttcaattcttgatttcatgtaatgatagtttcttagactatatgtgatggtgtgacttagtgaatctagtgcttggtaaataaaattctctcaaaaacaaaaattaggaagtaagcatttggctcctaaaattactaattataagaattcaaattccaatagaaaggaa

SEQ ID NO: 478 - DNA, 777 bp, Zea mays
  source: /note="Zea mays BAC clone full insert sequence contig bacm.pk155.l13.fis42"
atcgataacgcttgagagacatgctgaatccactaattttaggtccaaaacacgagtgtttggggtggtttcgtgcaatttcgttgtcgcacgtcacccgttccgaaaacgggtgtcgctgtgcatacaaagcacgagtttttgccaccggatcaatttcttcgtttttcgcaacgaacattcacaatccattactttaggtccaaaactcatgtttggggtggtttcgcgcaatttcgttgccgcacgtcacccgttccgaaaacgggtgtcaggttgcatacaagcacgagtatttgccaccgaatcaatttcttcgtttttcacaacgaacatgcccaatccactactttaggtccaaaacacatgtttggggtggtttcgcgcaatttcgttgccgcacgtcacccattctgaaaacgggtgtcggggtgcatacaagcacgagtttttgccaccggaaccgtttctttgtttttcgcaacgaacatgcccaatccactactttaggtccaaaactcatgtttgaggtggtttccgcaatttcgttgccgcacgtcacccattccgaaaacgggtgtcggggtgcatacaaagcacgagtttttgccaccggataaatatctttgtttttcgcaacgaacatgcccaatccactactttaggtccaaaacacatgtttcgggtggtttcgcgcaatttcgttgcagcacgtcacccatttcgaaaacgggtgtcggtgcatacaagcacaagtttttgccactggaaccattt

SEQ ID NO: 479 - DNA, 1197 bp, Zea mays
  VARIATION (715)..(715): /replace="c" or "g" or "t"
  misc_feature (715): /note="Nucleotide given in the sequence has no preference with respect to those in the annotation for said position"
  source: /note="Zea mays BAC clone full insert sequence contig bacm.pk155.l13.fis43"
tgaaattgttcgcttgcatggtgtgcccaacacaatcgtttctgatcgtgatgctaaatttcttagtcatttttggaggactttgtgggcaaaattggggactaagcatttattttttactacatgtcatcctcaaactgatggtcaaactgaagttgtgaatagaactttgtctactatgttaagggcggttctaaagaagaatattaagatgtgggaggactgtttgcctgatgttgaatttgcttataatcgatcattgcattctactataaagatgtgcccatttcaaattgtatatggtttgttgcctcgtgctcctattgatttaatgcctttgccatcttctgaaaaactaaattttgatgctactaggcgtgctgaattgatgttaaaactgcatgaaactactaaagaaaacatagagcgtatgaatgctagatataagtttgctagtgataaaggtagaaaggaaataaattttgaacctggagatttagtttggttgcatttgagaaaggaaaggtttcctgaattgcgaaaatctaaattgttgcctcgagccgatggaccgtttaaagtgctagagaaaattaacgacaatgcatataggctagatctgcctgcagactttggggttagccccacatttaacattgcagatttaaagccctacttgggagaggaagttgagcttgaatcgaggacgactcaaatgcaagaaggggagaatgatgaagacatccacactactgatacatctatgccaatacaagtaccaatttctggtcccattacttctgggtcccattactcgcgctcgtgctcgtcaactcaaccatcaggtgattacactcttcaatgcatgtccatcatatttagaccatggagacccgtgcactcttgttttgcttaggaaccagggagaagaccgaaagggaaaaggatttgaacatgctggattcggactgcagaagaacaccaacttgtgacggtcaccacggtcacatgcgggctcggattggaatgttcaagcacaacatggaaagcctatctgttctgaggccgccgtaatcattgtttccttaccgagacatttcctgccttttctgcccatggtgctgcgtgaccctattttgccccaatgggtcgtgtatcaagttggatccattagggacgcatcctagggttgcagca

SEQ ID NO: 480 - DNA, 1552 bp, Zea mays
  VARIATION (431)..(459): /replace="c" or "g" or "t"
  misc_feature (431)..(459): /note="Nucleotides given in the sequence have no preference with respect to those in the annotations for said positions"
  source: /note="Zea mays BAC clone full insert sequence contig bacm.pk155.l13.fis44"
catgcccaatccactactttaggtccaaaactcatgtttggggtggtttcgcgcaatttcgttgccgcacgtcactcattccgaaaatgggtgttgggttgcattcaaagcacgagtttttgccaccggaaccatttgttcgtttttcgcaacgaacatgcccaatccactactttaggtccaaaactcatgtttggggtggtttcgcgcaatttcgttgtcgcacgtcactcattccaaaaacgggtgtcgcggtgcatacaaaacacgagttttggccaccggaaccatttctttgtttttcgcaacgaaaatgcccaatccactactttaggtccaaaactcatgtttggggtggtttcgcgcaattttgttgccgcacgtcactcattccgaaaacgggtgtcgcggtgcatacaaagcacgagttaaaaaaaaaaaaaaaaaaaaaaaaaaaaacgcaacgaacatgcccaatccactactttaggtccaaaactcgtgtttggggtagtttcgcgcaatttcgttgccgcacgtcacccattccgaaaatgggtgtcggggtgcatacaaagcacgagtttttgccaccggaaccatttcttcgtttttcgcaacgaacatgcccaatccactactttaggtccaaaactcatgtttggggtggtttcgcgcaatttcgttgccgcacgtcactcatttcgaaaatgggtgttgggttacattcaaagcacgaatttttgccaccgtaaccatctgttcgtttttcgcaacgaacatgatatagctgaggtgcccgatctttcggcgagtagagataattccgatttggcggaagatgacccttgcgatccgactacgacgagcaagcccgaggcgccaatgcaatcgctgaaccaactccctgtggttaccgaccttgctgatgcaagatcggcctgatcgcgaagatcgtttcctgtgcgcaatcgaagaacgaacaagaaaaagatgcgagcaatctaatctattatacgagggtggagttctgaatacacgaagacagtgcagatttgcgcgtgttcgagagtagctaaggctaacgtaaaacaaaactcgaaaataaaggaggcgcagctcctggataaatagagggggcgcagcccctaggggcgggccaaccctaggtcgtccactatgggccgcagttgggctggtcgtctattcttctgggccctcattcttcagtagcatgatgaagttaagatctctggcatgggccgaagtgattggcctagctaatgaaggaagtggcgcttgatgtggaggtgctgctggtgtagtcgtactcataatgatgtcctcatcatcctccccttcttgaagtgaagtcgtcctcgacgacaactcctcatcctcggccatatatggtttcaaatctgcaacattaaaactagtggaaacaccaaattccgcaggcaggtcaaggacataagcattatcattaatctttgttagcaccttaaaaggaccagcagcacgaggcattaatttagaacgacgcaaagta

SEQ ID NO: 481 - DNA, 1297 bp, Zea mays
  VARIATION (382)..(382): /replace="c" or "g" or "t"
  misc_feature (382): /note="Nucleotide given in the sequence has no preference with respect to those in the annotation for said position"
  VARIATION (389)..(389): /replace="c" or "g" or "t"
  misc_feature (389): /note="Nucleotide given in the sequence has no preference with respect to those in the annotation for said position"
  VARIATION (1240)..(1240): /replace="c" or "g" or "t"
  misc_feature (1240): /note="Nucleotide given in the sequence has no preference with respect to those in the annotation for said position"
  VARIATION (1249)..(1249): /replace="c" or "g" or "t"
  misc_feature (1249): /note="Nucleotide given in the sequence has no preference with respect to those in the annotation for said position"
  source: /note="Zea mays BAC clone full insert sequence contig bacm.pk155.l13.fis45"
tcagtaggaggccacaagctcaaggatatattgtattagtttattttccccacaaatataggttattggaccatagattggtttttagaagcaaggttacattaggcactaggtgttctaccgtgtctgccctcctctggtctccactgcctctgcataacctcccggcctccccacatcaccccgtctcttaggcacgcctatggcttgcctcctctttgtcgtgcctgcctctagcctcctcccggccacgcctgtctccgctcccagccactgtcctccctcatgcagcgcagctgtggatctgggggcatgagtgcatgacacctatcatctgcctaccccttaggtgagacagtgcctcctcttcctagcgcctaaagctatgagcagcagatcgtgcatacgaccctgcaaaacattgttgcactgtatactgcaatgtttacaaggtagagtttgaaataagagatgaggatgagtaagctgctgaagattgcctaagtgcgcctaagcgagcgccttatagcgcgttgtggaacaccgattaggaggggataaatatatggaactttaattggaggagattaggcagagcaacatatttgttgctgtgcttcccctccctcaggtcacatgccccctctgcatcaggttcaaccctgtctcccacttctaactttctcactatcccccactcctacctgtctcccagacaacttaaacaatagcgacaattctatcattatgagtagccaccaggtttttggattttactggtgaatggttcaacaatatttaattgatatttaacatttgctccgttgtgtagggtctaattaatcaactcaaggaggctattccagcaatgcagcagtctatagacgaactctcagaagaagtgaatagtgtatctattaactcaatggaccaattgaactcgaggctgccactgccagtacaaattgcagggtttggccatgctgctgctgtgcttgcccacgcgcggggacaaggcaggcgcggagcagggcacgacgaccacgcgtccaggcgcgtgccacgtggcgcttaccatttgctcgggctgcaggcgagctagggacaaaacgagagcacgaggcgtcgtccagctctatcagtcttctctcctctctaccagctacaactttactataggggttagtgtggattagctactagattttgaactacaagcctcccactcaagcgtaagataccgtcgccatcccgcgagtcggaagtacccacttcgccctgtaggagtcgtttcggc

SEQ ID NO: 482 - DNA, 1666 bp, Zea mays
  VARIATION (1054)..(1054): /replace="c" or "g" or "t"
  misc_feature (1054): /note="Nucleotide given in the sequence has no preference with respect to those in the annotation for said position"
  source: /note="Zea mays BAC clone full insert sequence contig bacm.pk155.l13.fis46"
cgactacataaatagaggttggggtggtttcgcgcaatttcgttgccgcacgtcaccccctccgaaaataggtgtcgggttgcatacaaagcacgagtttttgccaccggatcaatttcttcgtttttcgcaacgaacatgcccaatccactacttttggtccaaaacacatgtttggggtggtttcacgcaatttcgttgccgcacgtcacccattccgaaaacgggtgtcggggtgcatacaaagaacgagtttttgccaccggatcaatttcttcgtttttcgcaacgaacatgctgaatccactactttaggtccaaaacacatgtttggggtggtttcacgcaatttagttgccgcccgtcacccattccgaaaacgggtgtcgggggtgcatacaagcacgagtttttgccaccggaaccacttcttcgtttttcgcaatgaacatgctcaatccgcttctttaggtccaaactcatgtttggggtggtttcgcgcaatttctttgccgtacgtcactcattccgaaaacgggtgtcgcagtgcatagaaagcacgagtttttgccaccaggacccatttcttcgtttttcgcaacgaacatgcccaatccactactttaggtccaaaactcatgtttggggtggtttcgcgcaatttcgttgctgcacgtcacccattccgaaaacgggtgtcggggtgcatacaagcacgagtttttgccaccggaaccatttcttcgtttttcgcaacgaacattcacaatccactactttaggtccaaaactcatgtttggggtggtttcgcgcaatttcgttgccatacgtcactcattccgaaaacgggtgtcgcagtgcatacaaagcaggagtttttgccaccggaaccatttctttgtttttcgcaacgaacatgcccaatccactactttaggtccaaaacacctgtttggggtggtttcgcgcaattttgttgctgcacgtcacccattccgaaaacgggtgtcgggatgcatacaaagcacgagtttttgccaccggaaccatttattcgtttttcgcaacgaacatgcccaatccactactttaggtccaaaactcatgtttggggtggtttcgcgcaatttcgttgccgcacgtcactcattccgaaaatgggtgtcggggtgcatacaagcacgagttttttgccaccagaaacatttctttgtttttcgcaacgaacattcccaatccactactttaggtccaaaacacatgtttggggtggtttcgcgcaatttcgttgtcccacgtcacccattccgaaaacgggtgtcgctgtgcatacaaagcacgagtttttgccaccggaaccatttcttcgtttttcgcaacgaacaagcccaatccactactttaggtccaaaacacatgtttggggtggtttcgcgcaatttccttgccgcacgtcaccaattccgaaaatgggtgtcggggtgcatacaagcacgagtttttgccacttgaaccatttcttcgttttcgcaacgaacatgcccaatccactactttaggtccaaaactcatgtttggggtggtttcgcgcaatttcgttgccgcacgtcactcattccgaaaacgggtgtcgcggtgcatacaaagcacaagtttttgccaccg

SEQ ID NO: 483 - DNA, 1123 bp, Zea mays
  source: /note="Zea mays BAC clone full insert sequence contig bacm.pk155.l13.fis47"
gacgccgaaacgactcctatagggcgaatgggacctcacacccgtcgggcaggatcgttaccttgatttgtatgcaccccgacacccgttttcggaatgggtgacgtgggacaatgaaattgcgcgaaaccaccccaaacatgtgttttggacctaaagtagtggattgggaatgttcgttgcgaaaaacgaaaaaatggttccggtggcaaaaactcgtgcttgtatgcaccccgacacccgttttcggaataggtgacgtgcgacaacgaaattgcgcgaaaccaccccaaacatgagttttggacctaaagtattggattgggcatgttcgttgcgaaaaacgaagaaatggtttcggtggcaaaaactcgtgctttgtatgcaccccgacacccgttttcggaatgggtgacatgcggcaacgaaattgcgcgaaaccaccccaaacatgagttttggacctaaattactggattgggcatgttcgttgcgaaaaacgaagaaatggttccggtggcaaaaaatcgtgctttgtatgcaccctgacacccgttttcggaaagggtgacgtgcggcaacgaaattgcgcgaaatcgacatgagttttggacctaaagtagtggattgggcatgttcgttgcgaaaaacgaaaaaatggttctggtggcaaaaactcgtgcttgaatgcaccccgacacccgttttcggaatgggtgacgtgcggcaacgaaattgcgcgaaaccaccccaaacatgtgttttggacctaagtagtggattgggaaatgtcgttgcgaaaaacgaaaaaatggttccggtggcaaaaacacatgctttgtatgcaccccgacacccggtttcggaatgggtgacgtgcgacaacgaaattgcgcgaaaccaccccaaacatgtgttttggacctaaagtattggattgggcatgttcgttgcgaaaaacgaagaaatggtttcggtggcaaaaactcttgctttgtatgcaccccgacacccgttttcggaatgggtgacatgcggcaatgaaattgcgcgaaaccaccccaaacatgtgttttggacctaaagtagaggattgggcatgttcgttgcgaaaaacgaagaa

SEQ ID NO: 484 - DNA, 1432 bp, Zea mays
  VARIATION (1182)..(1182): /replace="c" or "g" or "t"
  misc_feature (1182): /note="Nucleotide given in the sequence has no preference with respect to those in the annotation for said position"
  VARIATION (1200)..(1200): /replace="c" or "g" or "t"
  misc_feature (1200): /note="Nucleotide given in the sequence has no preference with respect to those in the annotation for said position"
  source: /note="Zea mays BAC clone full insert sequence contig bacm.pk155.l13.fis48"
tcgacgataacaccgacaaagagctcaggctggcgagggaagcagcgcgagagcaggcggcacagtgggcagccgcgcatccccatgggggcgcgcgtggcggcagctcggataggcgccgacgcgctgacggcgctccaggcgggggcgcacgcggcggcggcctagacgggcgtagacgcgccagcggtgctcccggcggcggcgatcgagtcgacggagatcgcggcctctacaggcggcacggttctccctccccggatcggtaccatggtcgccgcatggcccaggccattgtcagggacatcggtcccggcggtgggtggcctaccctcaccaagaccaactacgtcgagtgggccgcggtgatgagggtacggctccaggttcgccacatgtgggaagcagttcgttacgacgacgtcgactaccacgaggatcggcgggcgttggatgccctcattgctgcagtcccgcccgagatgcagttttcgctttcccagaagcggactgccaaggaggcctgggacgccatcgctgcgacccgcatcggcagcgatcgtgcccgcaagaccacactacaggcacttcgcaaggagtgggagaacctggccttcaagccaggtgaggatgttgatgactttgctctccgcctcaacactctgttgcagaagatggtgcagttcggcgacgacacctacgatgaggagagagctgttgagaaggtcttccgttgcatccccgagaagtacaagcagattgctcgctcgatcgagtctctgctagacctctccacgatgacgatcgaagaggcgattggtcgcctcaaggtggtcgacggcgacgaaccacaggctctctctgggcctatcactatcggcgggaagctacatctcactcgggagcagtgggaggtctgccagggtgacaagaagaaggaggagtcctcctcgacacgaggccgcaaacgcggcaagccgcgcaaggcgcgtggaggcgcccaggccggggcgcgaggacacgctgagggtggtgcacgtggaggtgcccaaggcggcgccgtcggcaacaagaagccggcacgagacgacggctgccacaactgcggcaagcttggccactgggccagggattgtcggcagccacgacgtggccaggccaacgtcgcacaggcggaagccagaaggaggaggccctgcatcctggcacatgcaagcatcgagccatctccagcggcaccggccgcagcggcactcctcccacttgatgagtcgaaagcacgcgcttttcttgggcgacgaatcaaaaaaaaatgatccaaaggaggggcctttaaaccggggccacttatcaatggaccgccgaacgggattcttcaccagctgaccctgcggccgaagctcctcagttggggaaccctcggcgaaaaata

SEQ ID NO: 485 - DNA, 1071 bp, Zea mays
  source: /note="Zea mays BAC clone full insert sequence contig bacm.pk155.l13.fis49"
gcagtcccgaatcatgtgcccaaaccctctgcaacgatggcactgaatatctcgtgtacgtcctgtggaagaagcggcgcctttggcagggggcaccactggcttggtcgtccctgtgcgcgatgtagtgctaggcgtagaaggtgcagggctggaaggagttgacctgtgtgtcggaccccggcctgcaaaagagttagtatatgtctttgatcgtcgtccttgcacttcacgttcagctttgcaagcatattcaaacaatgtggttatatcaaaataatccttataatcaagtatattctgaaatttccctgttcaaaccaccacgaaaacgcgccatagcagcgtcatccgactcaaccaaaaccacaacgaagcatacccttttgtaactcctggtaatattcctcaacagatagtgaaccttgttgaaaacgctgcattttgttaagcaaatcacgagcataataggaaggaacaaatctgtggcgcatggcagattttaattgggtccaagtaatgacactgttaatgggaagtttttgtttatactcacgccactaaattaaagcaaaatcagtaaattcactaatggcagccttcacttggctattagcaggaatatcatggcatgaaaatttctgttctacctccaattcccaatcaagatatgcagcaggatcatatttaccattaaaagatggaattttaaatttaatcttagaaaataagtcattagggggatgatgaaccacacggcgtgcacgacctcggcgatctccatcgtcctgctcagtgtcaccgccgtattcctgctctatctttgtggtcaacgcatcaaggcgtgccaggatagtgtcgagtgtggtgcgagtcgccgtttaagcaaggtcaagttggttgaaacgctcggtcgtggaagtgaccgttgaatcaagccgttcatgcatcgtcctaatgtcagcagcaagtccatcaacttgtcccttacttcctgcaactcggcatccaccatgtcgtgtgctcctgccataattagcgcaaacaccaaaacaccaaaaggagaaaaac

SEQ ID NO: 486 - DNA, 2696 bp, Zea mays
  VARIATION (1326)..(1354): /replace="c" or "g" or "t"
  misc_feature (1326)..(1354): /note="Nucleotides given in the sequence have no preference with respect to those in the annotations for said positions"
  VARIATION (2046)..(2046): /replace="c" or "g" or "t"
  misc_feature (2046): /note="Nucleotide given in the sequence has no preference with respect to those in the annotation for said position"
  source: /note="Zea mays BAC clone full insert sequence contig bacm.pk155.l13.fis50"
gaggatcgattcctaagaagcggtgctgcacgtcacccattccgaaaacgggtgtcggggtgcatacatgcacgagtttttgccaccggaaccatttcttcgtttttcgcaacaaacatgtccaatccactactttaggtccaaaactcatgtttggggtggtttctcgcaatttcgttgccgcacgccactcattccgaaaatgggtgtcgggtgcatacaaagcacgagtttttgccaccggaaccatttcttcgtttttcgcaacgaacatgcccaatccactactttaggtccaaaacacctgtttggggtggtttcgcgcaatttcgttgctgcacgtcacccattccgaaaacgggtgtcggggtgcatacaaagcacgagtttttgccacaggaaccatttcttcgtttttcgcaatgaagatgcccaatccactactttaagtccaaaactcatgtttggggtggtttcgcgcaatttcgttgccgtacgtcactcattccaaaaacgagtgtcggggtgcatacaaagcacgagtttttgccaccggaaacatttctttgtttttcgcaacgaacatgcccaatccactacattagctccaaaactcatgtttggggtggtttcacgcaatttcgttgccacacgtcacttaatccgaaaacgggtgtcgcggtgcatacaaagcacgagtttttgccaccggaaccatttcttcgtttttcgcaacgaacatgcccaatccactactttaggtccaaaacacaagtttggggtcgtttcgcgcattttcgttgccggacgtcacccattccgaaaacgggtgtcggggtgcatacaaagcacgagtttttgccaccggaaccattttttcatttttcacaacgaacatgcccaatccactactttaggtccaaaactcatgtttggggtggtttcgcgcaatttcgttgccgcacgtcactcattccgaaaatgggtgttgggttgcattcaaagcacgagtttttgccaccggaaccatttgttcgtttttcgcaacgaacatgcccaatccactactttaggtccaaaattcatgtttggggtggtttcgcgcaatttcgttgtcgcacgtcactcattccaaaaacgggtgtcgcagtgcatacaaaacacgagttttggccaccggaaccatttctttgtttttcgcaacgaaaatgcccaatccactactttaggtccaaaactcatgtttggggtagtttcgcgcaattttgttgccgcacgtcactcattccgaaaacgggtgtcgcggtgcatacaaagcacgagttaaaaaaaaaaaaaaaaaaaaaaaaaaaaacgcaacgaacatgcccaatccactactttaggtccaaaacacatgtttggggtggtttcgcgcaatttcgttgccgcacgtcactcattccgaaaacgggtgtcggggtggatacaagcacgagtttttaccaccgaaaccatttcctcgtttttcgcaacgaaaatgcccaatccactactttaggtccaaaacacatgtttggggtggtttcgcgcaatttcgttgccgcacgtcacccattccgaaaacgggtgtcggggtgcatacaaagcacgagtttttgccaccggaaccatttcttcgtttttcacaacgaacatgcccaatccagtactttaggtccaaaactcatgtttggggtggtttcgcgctatttcgttgccgcacgtcacccattccgaaaacaggtgtcagggtgcatacaagcacgagtttttgccaccggaaccatttcttcgttttttcgcaacgaacatgcccaatccactaatttaggtccaaaactcatgtttggggtggtttcgcgcaatttcgttgccgcacgtcactcattacgaaaatgggtgtcggggtgcatacaaagcacgagtttttgccatcagatcaatttcttcgtttttcgcaacgaacatggcgaatccactactttaggtccaaaacacatgtttggggtggtttcacgcaatttacgtgccgcacgtcacccattccgaaaacgggtgtcggggtgcatacaagcacgagtttttgccaccggaaccatttcttcgtttttcgcaacgaacatgctcaatccactactttaagtccataactcatgtttggggtggtttcgcgcaatttcgttgccacacgtcacccattccgaaaacgggtgtcggggtgcatacaagcacgagtttttgccaccggaaccatttcttcgtttttcgcaacgaacatgcccaatccactactttaggtcaaaaactaatgtttggggtggtttcgcgcaatttcgttgccgcacgtcacccattccgaaaacggatgtcggggtgcatacaagcacgagtttttgccaccgaaaccatttcttcgtttttcgcaacgaacatgcccaatcctctactttaggtccagaacacatgtttggggtggtttcgcgcaatttcattgccgcatgtcacccattccgaaaacgggtgtcggggtgcatacaaaaagcacgagtttttgccaccagaaccatttcttcgtttttcgcaagaacatgcccaatcaatactttaggtccaaaactcattttttggggtggtttcgcagaatttcgttgccgcacgtcaccttttcgaaaaag

SEQ ID NO: 487 - DNA, 1834 bp, Zea mays
  VARIATION (1716)..(1716): /replace="c" or "g" or "t"
  misc_feature (1716): /note="Nucleotide given in the sequence has no preference with respect to those in the annotation for said position"
  VARIATION (1725)..(1725): /replace="c" or "g" or "t"
  misc_feature (1725): /note="Nucleotide given in the sequence has no preference with respect to those in the annotation for said position"
  source: /note="Zea mays BAC clone full insert sequence contig bacm.pk155.l13.fis51"
tcctcgttccagaaacgttcattccattccaggaacgcaggaacaatctcgtccccgtagtgtaaaatctgttttaagtatcgtagcacgttcccgttcctcgaccccatcgatccgagaacctggttactaagagcatgcccacatccaaaacctcatactaaaagagtcactaaaggtcataatagaaatattctacaagattgttgaaattctctcaaatgcattactccatgaagcataacacagaaatgctagctcaggaatttaccatgttgtgtgaataggagggataaccacagttaaaatatgcttcagtttacggaagagtgaggtcagtaaggaaactcttctctcaaaagggagtcaattataggccactgcacttttagcactaaaagctttaccatcccttctgttatattgatcttataccaccacccatcagtattgtgtaattttgatgttgagttggccattttgcatgtcccatttattcctccacttaactctacttctccaaacaagccattgtggcaacaaggggtgacagcaagcatggtctgtgatcaattataactggatgaacagaaaatatggaagctgtttacatacaaggcctatataagtatataactcttcttttggaggggtacgatttttatgtgtttgcaccttagcccccaggtgagtcaagggcgtgtaatgtcattctgaatggattgtttaggataagttgttttatgtcaggtgaacatggatagaaaaaacttgctattagttgagagaatctttgcaaatccatcctattaagcatcagcaatctatttatcctattgtagtgatgaactactaagcattagcattcattatttatcttgaaaccagcaccacatgacatttggttgagacaatgcacttggatataaacaatctatgtcacatctagtttcgtctatatttcaaaaagtgtttccaaggatccaatgaagctaagttgcagtagatcccaaccgaccaaaacaaatgacacccagcctagtccactggtccactaacctcggtccgcagcatgtggcaagtgacgagaccctagaattgctccgaggcagtgccccatgctgttccagctcgctgatgatcccttgcacgatctaagcaaccaatcaccggcaaagggccaacaaacatcaaaacatcacattttattaaacaaagaaatgtgaaacaaactgcagaaatcccaccttcctgaactccctggactgagcggagtcgaagattggccagaccttgtcaaaatcctgtgttgaatgccaaccaaaccaaatcaaaggtcaggaaagcccaaaaaaatacgcaaacacaagggaaccgaaaattcggaagagccagcggattgccttcgcggactgcgcggggccgcggagcgaggagagaaggaagtagaggagttgctcgccaaggcgggggttggagtgacgaaataggcccacgcggccggcgggggaagagggagagccgaggaccgcgggatcgaggccgaggagtaggcagttagtgtacatggcgccctccagctccgcctcgcgctccttctcccgatccgccgccatggctgcacttgctctccacggggtgggggtgcgggtaggtagagcagctaggtttacagggagaagggcgccattggaggccgagccgtcagatctcgcagaaggtggaaagggggagaaaaaaacagcaaccgaggaggcgaacggtcaggccccgggtcagggggattgaagctaattccatacattctccctctcatctccctctgtttaatttt

SEQ ID NO: 488 - DNA, 1743 bp, Zea mays
  source: /note="Zea mays BAC clone full insert sequence contig bacm.pk155.l13.fis52"
caacatgagttcttcccaaataagatgtgctagacatataatcaataaagcatgaataatttcaaacgatggtacccaattaggaatatggatacgaacacaaatagcacaaacataatcaagtatgagactcttcaatcaaaagacgaaataaccatcactgttttacttgcctttaccgaagttcgggcaaaatccctaagaacgatccggaagtccaccacctgtttttgacacccaacttagtgcaccaaattctcatgaaaaaaactcaaagacaacaccgcacctacgtgcaatctcaacccccgccgcggtaacaattctcccctcactaaccaaactgcagcggcgctgcttaaccattccataacttaaaatttaggacagcagtgatgataaacaaaaacttcagagacaactacataaaattccccacaagttttgtatacaactcatgattgaattctaacatctacttacctctaaacggtcctcaaaataaaccctgcaatctgtttttttttcctgatttgagcagcgacatacgcggattcaaacagcgataacttttaaaatataattccgatttgaacgcataagtacttgttggaaagataagaaaaagccctacatgattcttatactgattaacactaattactcccgaaacatccccagaaactgctaacactgctgctgttcatcactctgaaaaatctgttttctggacagccacatacccggattcaaacgatgataacttttaatttataactccaaattgagcgcataaatactcgttggaaagataaaacaaagttctacaagattctcatactgattaacactaattgctcccaaaaaatccccagaaactgctaacactgctgctgttcatcactctgaaaaatctgttttctggacagccacatacccggattcaaacgatgataacttttaatttataactccaaattgagcgcataaatactcgttggaaagataaaacaaagttctacaagattcccaaattgatccccattaaatcttcacgaaaaaaactaaaaactgctggaactaccgctgttcatccaccacgcaaaattctggacagcccccctctatctaatcgcaaacgcaacatctaatcaattgaatcgcagcgcaaatgaacaagggatgaacacaaaagaaaaatcaccttgggttctccccttttccttcctcccttcttccttccaccaaaacgattggagattcgcaccaaaagacgatgatatatccgagcggcacggagtagcacctagggaggaggggattggggggggggggctagggttttggtggctgcaacaatggaaggaggaagaagtgggcaaggggggcggccgccaaagggaaaagaagaatgggggggggccgcttcccatgggggggtaattaagaaggtggcggctaaggtttgggagggctaatgggcccaaacacccattgtgggccaaataaaccacgcgacagctcccgaccgtaacgccaacgtcaaacccaaaaaattctactggcccaatttcgaaaggtgttcacaaaattcccaatcccccaaacaacaactgggtggaggggaaaaaaccaaaaagaacaacccccaaattctttttcttgtaaaacgggggatacattttacccctccttaaaagaatcgaacctcaaattttgagctttctatccgaatgacacaag

SEQ ID NO: 489 - DNA, 1841 bp, Zea mays
  VARIATION (1671)..(1671): /replace="c" or "g" or "t"
  misc_feature (1671): /note="Nucleotide given in the sequence has no preference with respect to those in the annotation for said position"
  VARIATION (1678)..(1678): /replace="c" or "g" or "t"
  misc_feature (1678): /note="Nucleotide given in the sequence has no preference with respect to those in the annotation for said position"
  VARIATION (1738)..(1738): /replace="c" or "g" or "t"
  misc_feature (1738): /note="Nucleotide given in the sequence has no preference with respect to those in the annotation for said position"
  VARIATION (1744)..(1744): /replace="c" or "g" or "t"
  misc_feature (1744): /note="Nucleotide given in the sequence has no preference with respect to those in the annotation for said position"
  VARIATION (1779)..(1779): /replace="c" or "g" or "t"
  misc_feature (1779): /note="Nucleotide given in the sequence has no preference with respect to those in the annotation for said position"
  VARIATION (1784)..(1784): /replace="c" or "g" or "t"
  misc_feature (1784): /note="Nucleotide given in the sequence has no preference with respect to those in the annotation for said position"
  VARIATION (1805)..(1805): /replace="c" or "g" or "t"
  misc_feature (1805): /note="Nucleotide given in the sequence has no preference with respect to those in the annotation for said position"
  source: /note="Zea mays BAC clone full insert sequence contig bacm.pk155.l13.fis53"
tctgggacggatcgtaacactagcgagggagagaatagggaatttccccccccccccctcagaagaggagttatagcctttttcgtggctgttgatcgattctccaaatggctcatttcaagggtgggagggagtgatgatgctagcaatgttgctgaattgttttttagagagattattcgtttgcacggtattcccaatacaatagtctcggatcgtgatgccaagtttctgagtcatttttggagatctctgtggaataaattaggaactaaattgctgtttagcaccacttgtcaccctcagactgatggtcaaactgaggtagttaatcgaactttgtctaccatgcttagggctgttttagacaaaaatttgaaacgttgggaggattgcttacctcatgttgagtttgcttataatcatgcaacacattcttctacaaagatgtgcccttttcaaattgtttatggttacattcctagggcgcctattgctttgttttcgcttgatgctacggacgccccacacatagatgctcttgcacatgttgaacaaatgattaatctccatgaacaaactcaacaaaacattgctgttgctaatgctaaatatcagattactggtagtaaaggccggaaactagttaattttgaacctggtgatatggtttggttgcatttgagaaaggatcgttttcctactttgcgccgttctaaattgatgcctcgtgctgctggtccttttaaggtactaaccaagattaatgataatgcttatatccttgacctacctgcggagtttggtgtttccactagttttaatgttgcagatttgaaaccgtatgcgggagaagatgaggagttgccgtcgaggacgacttcagttcaagaaggggaggatgatgaggacatcaacaccaacacgagtacatctacaccagcagcaccttctccagcccaggcaccatcttccccagtccaggcgccaccccttccacctgggccagtgactcgggcccgtgcaagagaattgaactacatcatgttgttaaagaacgaaggcccggaagaatagacgaccagcccaattgcggcccataatggacgacctagggttggccgcccctaggggctgcgccccctctctatttattcaggagctgcgcctcctttatttcccgagttttgttttacgttagccttagctactctcgaacacgcgcaaatctgcgctgtcttcgtgtatccagaactccaccctcgagtaatagattagattgctcgcatctttttcttgttcgttcttcgattgcgcacaggaaacgatcttcgtgatcaggccgatctcgcatcagcaaggtcggtaaccacagggagttggttcagcgattgcattggcgcctcgggcttgctcgtcgtagtcggatcgcaagggtcatcttccgccaaatcggaattatctctactcgccgaaagatcgggcacctcagctacatcaattggtatcagatttccaggttgatcggtgagtttatcgagcgttttttttcctacagtccacaaaaccacataaaaattcaggttagatcttaccccggcacccttttgagcctcgcactttcttttcataatctgcattgttgaatttgtgtgctttcgcgtcatttgatgctggatgcattgtgttcttcccacattcaaaccctagcgcccgcaccatctcccgtttgatcacagcacaaaccgagagcacacagcgtttccattattttctccatcggatacgtccaaaaaaaaccgaaaaaaacaacctgagtcacggccgttttcctggatttt

SEQ ID NO: 490 - DNA, 2014 bp, Zea mays
  VARIATION (1934)..(1936): /replace="c" or "g" or "t"
  misc_feature (1934)..(1936): /note="Nucleotides given in the sequence have no preference with respect to those in the annotations for said positions"
  source: /note="Zea mays BAC clone full insert sequence contig bacm.pk155.l13.fis54"
aaagcgtgcgagactttgacgaattttttctttattttcctgaatttttttgacaattttgtcgaaccccaaacagaccgtaggtgagtttggccggcctcagaatggtgtcaactaactcctgtaaaaatttcagattttttggacacccgagcgaaaagttatgcccggtttatggaaggttcctcaagttatgttttaaaaacgaccgggatgaaacaaacgtatcctttctccttcgttttcttttttttgtttctgttttttttatgtaaccgaaggagaaaaacaaggaagcggtcgttgactcggtttgttttttttctgtttttttcgtaaccgaaggagaaaatcaaggaaacggccgttgactcggtctgttttttctgtttttttttgacgtaaccgaaggagaaaaacaaggaaacaatgttgactcggtttgtggcgtgatcaaacgggagatggtggcggcgctagggtttgaatggtggaagaacacaatgcaaccagcaacaaatgacgcgaaagcacacaaattcaacaatgcagattattgaaagaaagtgcgaggctcaaaagggtgctgggataagatctaacctgaatttttatgcggttttgtggactgtaggaaaaaaaacgctcgataaactcaccgatcaacctggaaatctgataccaattgatgtagctgaggtgcccgatctttcggcgagtagagataattccgatttggcggaagatgacccttgcgatccgactacgacgagcaagcccgaggcgccaatgcaatcgctgaaccaactccctgtggttaccgaccttgctgatgcgagatcggcctgatcacgaagatcgtttcctgtgcgcaatcgaagaacgaacaagaaaaagatgcgagcaatctaatctattactcgagggtggagttctgaatacacgaagacagcgcagatttgcgcgtgttcgagagtagctaaggctaacgtaaaacaaaactcgaaaataaaggagacgcagctcctggataaatagagggggcgcgccccctaggggcggccaaccctaggtcgtccactatgggccgcagttgggctggtcgtctattcatctgggccctcattcttcagtagcatgacgaagttaagatctctggcacgggccctagtgattggcccagctaatgaaggaagttgcgcttgatgtggaggtgctgctggtgtagtcgtactcatagtgatgtcctcatcagacggtgttgagacggtcacggagcttagtgctgagccccctcctaaacatgtccctcttcttctcgtccgcgtttgcatgatatccggcatactggcacaggtcattgaaggcctgagcatactataacaatgttcggtttccctgagtgagtgccagaaactcgttgagctttcggtccataatgcctgctggtatatggtgccccctgaaagctgccttgaactctctccattccacctctcggtcatctggctgcatagcaagaaaatggtcccaccaggtccttgcgggtccgcgaagctactgggtggcgaacctgaccttagtgacctctgagcaaactccatggagtagcgagaatttggattccactactctcaaccatacatccgcatcaagtgggtcctctgccctggtgaacaatggtggctgggtactgaggaactcctggtaggtggctgccgcggacgctgatgatcactaccaccatagtgctgaggtggcggctgacgctgagctagttgcctcaagatctcattctgctgagccattagctcctgcagcgtaggaggcggtggcggcggtggaggaacgcgctcattttgaccacgacgcgctctcccggccatctaaaagaatcacatatatttttaataacacatctttgaggttcaggaaatcatcacggtgaaagaagtcaaaggcgaaactgatagattcttgcataaatcataaagactcacatggcataactttc

SEQ ID NO: 491 - DNA, 2270 bp, Zea mays
  VARIATION (805)..(805): /replace="c" or "g" or "t"
  misc_feature (805): /note="Nucleotide given in the sequence has no preference with respect to those in the annotation for said position"
  VARIATION (915)..(915): /replace="c" or "g" or "t"
  misc_feature (915): /note="Nucleotide given in the sequence has no preference with respect to those in the annotation for said position"
  source: /note="Zea mays BAC clone full insert sequence contig bacm.pk155.l13.fis55"
gtttggggtgtttcgggcaatttcgttgccgcacgtcacccctttcgaaaataggtgtcgggtgatacaaagcacgagttttgccacggataattctcgttttcgcaacgacatccatcatactttggccaaaaatgttgggtggttcgcgcaatttcgttgccggtcacccattccgaagatgggtgtcggcgtgcatacaaagcacgagtttttgcctccggagcaatttcttcgtttttcgcaacaaacatgcccaatccactactttaggtccaaaactcatgtttggggtggtttcgcgcaatttcgttgccgcacgtcactcattccgaaaatgggtgttgggttgcatacaaagcacgagtttttgccaccgaaactgtttcttcgtttttcacaacgaacatgcccaatccactactttaggtccaaaactcatgtttggggtggtttcgcgcaatttcgttgccgcacgtcaccccttccgaaaacaggtgtcggggtgcatacaaatcacgagtttttgccaccggaacaatttcttcgtttttcccaaacaacatgcccaatccactaatttaggtccaaaactcatgtttggggtggtttcgcgcaatttcgttgccgcacgtcactcattacgaaaatgggtgtcggggtgcatacaaagcacgagtttttgccatcagatcaatttcttcgtttttcgcaacgaacatggcgaatccactactttaggtccaaaacacaagtttggggtggtttcacgcaatttcgttgccgcacgtcacccattccgaaaacgggtgtcgagggtgcatacaagcacgagtttttgccaccggaaccatttcttcgtttttcgcaacgaacatgctcaatccacttctttaggtcaaaactcatgtttgaggtgtttcgcgcaatttcgttgccatacgtcactcattccgaaaacgggtgtcgcagtgcatacaaagcaggagtttttgccaccggaaccatttctttgtttttcgcaacaaacatgcccaatcaactactttaggtccaaaacacctgtttggggtggtttcgcgcaattttgttgctgcacgtcacccattccgaaaacgggtgtcgggatgcatacaagcacgagtttttgccaccggaaccatttcttcgtttttcgcaacgaacatgcccaatccactactttaggtccaaaactcatgtttggggtggtttcgcgcaatttcgttgccgcacgtcactcattccgaaaatgggtgtcggggtgcatacaaagcacgagtttttgccaccagaatcatttctttgtttttcgcaacgaacatgcccaatccactaatttaggtccaaaactcatgtttggggtggtttcgcgcaatttcgttgccgcatgtcacccattccgaaaacgggtgtcggggtgcgtacaaagcacgagtttttgccaccggaaccatttcttcgtttttcgcaacgaacatgctgaatcctctactttaggtccaaaacacatgtttggggtggtttcacgcaatttcattgccgcatgtcacccattccgaaaacgggtgtcggggtgcatacaaagcacgagtttttgccaccgaaaccatttcttcgtttttcgcaacgaacatgcccaatccaatactttaggtccaaaactcatgtttggggtggtttcgcgcaatttcgttgtcgcacgtcacctattccgaaaacgggtgtcggggtgcatacaagcacgagtttttgccaccggaaccattttttcgtttttcgcaacgaacattcccaatccactactttaggtccaaaacacatgtttggggtggtttcgcgcaatttcattgtcccacgtcacccattccgaaaacgggtgtcggggtgcatacaagcacgagtttttgccaccggaaccattttttcgtttttcgcaacgaacattcccaatccactactttaggtccaaaacacatgtttggggtggtttcgcgcaatttcgttgtcccacgtcacccatccgaaaacgggtgtcggggtgcatacaagcacgagtttttgccaccggaaccatttcttcgtttttcgcaacgaacatgcccaatccactactttaggtccaaaactcatgcttggggtggtttcacgcaatttcgttgccgcacgtcacccattccgaaaacgggtgtcggggtgcattcaagcacgagtttttgccaccagaaccattttttcgcctatcagtgtaa

SEQ ID NO: 492 - DNA, 1451 bp, Zea mays
  source: /note="Zea mays BAC clone full insert sequence contig bacm.pk155.l13.fis56"
ttgggaaacacatctggaaactcagacacaatcttgatcctctcaattgggtctgcttcactgctatcaacgaccatctgataacaacttcctttctttggctcaggcgggactaactcggtcactacttcctctcctagtggagacaccaacttgattgtcctcttatcacaactgataactgcctgatacttatctagccaattcatccctaagatgacatctattccctgagtacccattactatgaggttggtgggaaacgctatcccccttatttccacacttacattcaaacatatgctatcagttcgaattctaccaccggctgagtcaatttgaatgggggttgacatggtagtaattggaagattatgtgcttctacccatgatgtagtaatgaaagaatgcattgccccagtatcaaataatatttctacaatatgggagtcgaatgggaacatacctactatcatgccgggggtctcctgaactccttcagcctccaagtgattcagtcttccatgattgtaacgcggctgagagcggttgcctgctccaggctgagacacattctgctttgctagggcattggggcctgactgctgctgggctgccttcttcggacattgcatcacccagtggccttgatctccacagtggaaacatgccctgtttccaacctgagctggtgctgcctgactgttctgctggtttgctggggcaggaagacgaggtgcctgctgattctgcctctgaagctgacctcctgactgattgccctgacggttctgatactggtgctgaggatactgcctttggaactgctgatgttgctgaggtggacgttggttctgcctgaactgctgaggttgattggctgagaaacgaggacggttgctgcttccaggctagggtccactgatcttgcgcttacgatcctccatctccttacgcttcctctctgtcatgattgctctgtcaatcaggtgctggaacgtcgggaaggtatgattcatcaactgatactgaagagggtcaaccaagactctcaggaaacggtactgtcgcttggcgtcggtgttgacatcttcaggagcatagcgagacaactgtagaaacctgtctcgatactcactgactgacatcgacccttgcttaagggccaggaactcctccttcttcactgtcatcagacctgcaggaacatggtactgacgaaagctacctctgaactcttcccaggtgatggcgtcgggttggcatgggtggcgagataagactcccaccatgactgagctgctcctctcaacagacggggaccatacaggactttctccctgtcgtcacactgagcggtatgcaactcccgctccacagtgcgcagccagtcttcagcatccatggggtcagaagagtgagcaaacgttggtggatgacctctcatgaat

SEQ ID NO: 493 - DNA, 1695 bp, Zea mays
  source: /note="Zea mays BAC clone full insert sequence contig bacm.pk155.l13.fis57"
ttgcgcaatttcgttgccgcacgtcacccattccaaaaacgagtgtcagggtgcgtataagcacgagtttttgccaccggaaccatttcttcgtttttcgcaacgaacatgctcaatccactactttaggtccaaaactcatgtcagtttcgcgcaatttcgttgctgcacgtcactcattccgaaaactggtgtcggggtgcatacaaagcacgagtttttgccaccggaaccatttcttcgtttttcgcaacgaacatgcccaatccagtaatttaggtccaaaactcatgtttggggtggtttcgcgcaatttcgttgccacacgtcacccattccgaaaacgggtgtcgcggtgcatacaaagcacgagttttcgccaccggaaccatttcttcatttttcgcaacgaacatgcccaatccactaatttaggtccaaaactcatgtttggggtggtttcgcgcaatttcgttgccgcacgtcacccattccgaaaatgggtgttggattgcattcaaagcatgagtttttgccaccgggacatttcttcgtttttcgcaacggacatgcccaatccactactttaggtccaaaacacatgtttggggtggtttcgcgcaatttcgttgccgcacgtcacccattccgaaaacgggtgtcgagttgcattcaaagcacgagtttttgccaccggatccatttcttcgtttttcacaacgaacatgcccaatccactaatttaggtccaaaactcatgtttggggtggtttcgcgcaattttgttgtcgcacgtcactcattccgaaaacgggtgcatacaagcacgagtttttgccaccggaaccatttcttcgttttttgcaacgaacatgcccaatccactactttaggtccaaaactaatgtttggggtggttttgcgtaatttcgttgccgcacgtcacccattccgaaaacggatgtcggggtgcatacaagcacgagtttttgccaccgaaaccatttctttgtttttcgcaacgaacatgcccaatcctctactttaggtccaaaacacatgtttggggtggtttcgcgcaatttcattgccgcacgtcacccattccgaaaacgggtgtcggggtgcatacaaagcacgagtttttgccaccggaaccatttctacgtttttcgcaacgaacatgcccaatccactactttaggtccaaaactcatgtttggggtggtttcgcgcaatttcgttgtcgcacgtcacctattctgaaaacgggtgtcgggtgcatacaaggacgagtttttgccaccggaaccatttcttcatttttcgcaacgaacattctcaatccactactttaggacccaaacacatgtttgggggtgggttcgcgcaatttcgttgtcgcacgtcacccattccgaaaaaggtgtcggggtgcatacaaacacaagtttttgtcacccgaaccatttcttcgtttttcgcaacaaagattccccatccactactttagggtccaaaaatcatgttttggggggggtttcggccaatttttgttgccgcaacgtcaccccatttctaaaaaagggggttggggggtccttacaagcaccaagtttttttcccccgcgaacattttttttcttttttttccacagaaatgcccccaacccctaatttttggggccaaaacat

SEQ ID NO: 494 - DNA, 2225 bp, Zea mays
  VARIATION (2182)..(2184): /replace="c" or "g" or "t"
  misc_feature (2182)..(2184): /note="Nucleotides given in the sequence have no preference with respect to those in the annotations for said positions"
  source: /note="Zea mays BAC clone full insert sequence contig bacm.pk155.l13.fis58"
tggatgaagtccttggatcaagcaatggccattgagaagatgctccaccgtctcaacccctcaaaggtgagccgatgttccatgaagttcaatgttgaggagcagaggcaaagcaccgccgccggaggccatagcttgacgagagcacaatctgaaaagtagtcaaagagggggcacatatagggattgacttccattgcatacacgggtagccagctcgttggagaagaaagcaatgaaggtgctcggcgcagcccaacgtaggccaatcgcttcagcgtcaatgccagaaccctccggatcgataaaggagacgagtagagcacgtcaaaggtcatctttagcatggcaaatcctcctagagtgcctgatgacacatgggtcggcaatcaccgtcgggcggtagggttagccaccgatggatgtaggggagaatttcagtcgcaactgcctctatatctcctcctctgaccgtggggagtacgccttctctcgccaccaccaaaacccacgccgccgacctccgcattaccaaccatctcacaaccaagggcagccaccagagatgtcgcctaggatacagggcgccacaccaagactcgcctatgctgatgcggagccgtctgccggtgcgggcacacgcaagcatggtgcccaggtgatagtcgcctagagggggggtgaatagggcgaaactgaaatttacaaatataaacacaactacaagccgggttagcgttagaaatataaacgagtccacgagagagggcgcaaaacaaatcgcaagcaaataatgaagtgagacacacggatttgttttaccgaggttcggttcttgcaaacctactccccgttgaggaggccacaaaggccgggtctctttcaacccttccctctctcaaacggtcccttggaccgagtgagcttctcttctcaaatcacttgggaatcaaacttcccgcaagggccaccacacaattggtgcctcttgcctctattacaatgtgagtttttgatcacaagaaagaatcaagatagaagaaagcaatccaagcgcaagagctcgaaagaacacaaggaaatcactctctctagtcactagggttttgtgtgtggaattggagaggatttgatctctttggtgtgtctagaattgaatgctagagctcttgtagtagttgggaagtggaaaacttggatgcaatgaatggtggggtggtttgggtatttatagccccaaccaccaaaagtggtcgttgggaggctgtctgctcgatggcgcaccggacagtccggtgcacaccggacagtccggtgccccctgccacgtcatcactgtcgttggattctgaccgttggagcttctgacttgtgggcccgccttggtgtccggtgcacaccggacatgtactgttggctgtccggtgtgccagcatgggcgattctgacttctgcgcgcgcatttattgctctgcagagagccgttggcgcggagatagccgttgccccggagtcgcaccggacagtccggtgcacaccggacagtccggtgaattatagtggacgagccgttggcttttcccgaagctggcgagttcctgaggccgacctcccttggcgcaccggacactgtccggtgtacaccggacagtccggtgaattatagtcgagtcgcctctgggaatttccgaaggtggagagtttgagtctgagttcccctggtgcaccggacatgtccggtggcacaccggacagtccggtgcgccggaccaggggtgccttcggttgcccctttgctcctttgttgaatccaaaacttggtctttttattggctgagtgtgaaccttttacacctgtataatctatacacttgggcaaactagttagtccgattatttgtgttgggcaattcaaccaccaaaattaattagggactaggtgtaagcctaattccctttcaccaggcaaccggcagaggaaacaccgcacctatcgacgacacgctgctgcgcgatgggacagggagaagcaattgaagcgcttcccgtcttaggttaatagggataggcctgggaggggcttccaaaggggcagggcgaccccggaccaacccccaccattttttcacccttttccaaagtttccccccctcccctcccttggaaaaaaagacacctccgaaacgggggaggggggggggtttttttaaaaaacaccccccccc

SEQ ID NO: 495 - DNA, 1639 bp, Zea mays
  source: /note="Zea mays BAC clone full insert sequence contig bacm.pk155.l13.fis59"
ccattccgaaaaacgaggtgtgggggggcatacaaagcacgagtttttgccaccggaaccatttcttcgtttttcgcaacgaacatgccaaaatccagtaatttaggtccaaaactcatgtttggggtggtttcgcgcaatttcgttgccacacgtcacccattccgaaaacgggtgtcgcggtgcatacaaagcacgagttttcgccaccggaaccatttcttcatttttcgcaacgaacatgcccaatccactaatttaggtccaaaactcatgtttggggtggtttcgcgcaatttcgttgccgcacgtcacccattccgaaaatgggtgttggattgcattcaaagcacgagtttttgccaccgggccatttctttgtttttcgcaacgaacatgcccaatccactactttaggtccaaaactcatgtttggggtggtttcgcgcaatttcgttgccgcacgtcactcattccgaaaacgggtgtcgcggtgcatacaaagcacgagtttttgccaccggaaccatttcttcgtttttcgcaacaaacatgcccaatccactacattaggtccaaaacacatgtttggggtggtttcgcgcaatttcgttgccgcacgtcacccattccgaaaacgggtgtcggggtgcatacaaagcatgagtttttgccaccggaaccatttcttcgtttttcgcaatgaacatgcccaatccactactttaggtccaaaactaatgtttggggtggtttcgcgcaatttcgttgccgcacgtcacccattccgaaaaacgggtgtcggggttcatacaagcacgagtttttgccaccgaaaccatttcttcgtttttcgcaacgaacatgcccaatcctctactttaggtccaaaacacatgtttggggtggtttcgcgcaatttcattgccgcacgtcatccattccgaaaacgggtgtcggggtgcttacaaagcacaagtttttgccaccggatcagtttcttcatttttcgcaacgaacatgcccaatccactactttaggtgcaaaactcatgtttgggatggtttcgcgcaatttcgttgccgcacgtcaccaattccgaaaacgggtgtcggggtgcatacaaagcacgagtttttgccactggaaatttctttgtttttcgcaacgaacatgcccaatccactaatttaggtccaaaactcatgtttggggtggtttcgcgcaatttcgttgccgcacgtcacccattctgaaaatgggtgttgggttgcattcaaagcacgagtttttgccaccggaaccatttcttcatttttcgtaacaaacatgcgcaatccactactttaggtccaaaactcatgtgtggggtgggttcacgcaattttgttgccgcacgtcactcattcccgaaacaggtgtcgcggtgcgtacaaagcacgagtttttgccaccggaaccgtttcttcgtctttcgcacgaaaaagcgcaatccactacattaggtgcaaaactcatgtttgaggtgggtttcgcgcaaatttgtttgcgcatgtaacccaatccaaaaagggtgtcggggtgcgtacaaaacacgagtttttgccccaggagcaatttctttgtttttcccaacga

SEQ ID NO: 496 - DNA, 1687 bp, Zea mays
  source: /note="Zea mays BAC clone full insert sequence contig bacm.pk155.l13.fis60"
gacgaaccgagctagctggaacacacagcttgttagcgcgaaacaggaacccatcctgtatgtgaaatttgccccatggtatcccattaatacaatggccgaaagcatctttaaaatcaacatcgtcaaaatactgatccttcacagtgtccaaaccaaagattttaaaatctaattgtgacagcatggtatagcgacgagacaaagcatcagcaataacattgtccttcccgttcttgtgtttaataatgtaaggaaaggactcaatgaattcgacccatttagcatgacgacggttcagatttgtttgggtacgaatatgttttaaagcctcatgatcagaatgaattatgaactcactgatgaagctgaggtgcccgatctttcggcgagtagagataattccgatttggcggaagatgacccttgcgatccgactacgacgagcaagcccgaggcgccaatgcaatcgctgaaccaactccctgtggttaccgaccttgctgatgcgagatcggcctgatcacgaagatcgtttcctgtgcacaatcgaagaacgaacaagaaaaagatgcgagcaatctaatctattactcgagggtggagttctgaatacacgaagacagcgcagatttgcgcgtgttcgagagtagctaaggctaacgtaaaacaaaactcggaaaataaaggaggcgcagctcctgaataaatagagagggggcgcagcccctaggggcggccaaccctaggtcgtccattatgggccgcaattgggctagtcgtctattcttccaggccttcgttctttaacaacatgatgtagttcaattctcttgcacgggcccgagtcactggcccaggtggaaggggtggcgcctgggctggagaaggtgctgctggtgtagatgtgctcgtgttggtgttgatgtccgcatcatcctccccttcttgaactgaagtcgtcctcgacggcaactcctcatcttctcccgcatacggtttcaaatctgcaacattaaaactagtggaaacaccaaactccgcaggcaggtcaaggatataagcattatcattaatcttggttagtaccttaaaaggaccagcagcacgaggcatcaatttagaatggcgcaaagtaggaaaacgatcctttctcaaatgcaaccaaaccatatcaccaggttcaaaagtaacatgttttcttcctttactaccagcaacctaattttttgcattagtagcagcaatgttctgtttcgtttgttcatgtatggtaatcatttgttcaacatgtgcagaagcatctacatgtggggcgttcgcagcattaagtgaaatcaaatcaataggtgccctaggaatgtaaccataaacaatctggaaagggcacatctttgtagaagaatgcgtagcatgattgtaagcaaattcaacatgaggcaagcaatcctcccaacgtctcaaattcttgtctaaaacagccctaagcatggtagataaagttctatttactacctcagtttgtccatcagtctgaggtgacaagtagtgctaaacaacaatttagttcccaattttttccaaagagatctccaaaaatggcttagaaacttagcatcgcgatcagagactattgtttttggaataccatgtaaacgaataatttctctaaagaacaattcagcaa

SEQ ID NO: 497 - DNA, 1817 bp, Zea mays
  source: /note="Zea mays BAC clone full insert sequence contig bacm.pk155.l13.fis61"
gggtgtttcggcaattttggtgtcggaacgtcacccaatccgaaaaacggtgtcgggggtgcatacaagcacgagtttttgccacccgaaccatttccttgttttttcgaacggaccatgcccaatccactactttaggtccaaaactcatgtttcgggtggttttgcgcaatttcgttgccgcacatcactcattccgaaaataggtgtcgggggtgcatacaaagcaagagtttttgccaccggaaccatttcttcgtttttcgcaacgaacatgcccaatccactactttaggtccagaacacatgtttggggtggtttcgcgcaatttcgttgccgcacgtcacccattccgaaaccgggtgtcggggtgcatacaaagcatgtgtttttgccaccggaaccatttcttcgtttttcgcaacgaacatgcccaatccactacattaggtccaaaacacatgtttggggtggtttcgcgcaatttcgttgccgcacgtcacccattccgaaaacgggtgtcggggtgcatacaaagcactgatgaatcccctaatgattttggtaaaaatcattaagttaaggtggatacacatcttgtcatatgatcaaatggtttcgcgaaaaatcaataatcagacaacaagatgtgcgaactcgatattttacacgactctctttaccaattctgccccgaattacacttaaaacgactcaacagcttaacgttggcttgccacgcattacttgactgtaaaactctcactcttaccgaacttggccgtaacctgccaaccaaagcgagaacaaaacataacatcaaacgaatcgaccgattgttaggtaatcgtcacctccacaaagagcgactcgctgtataccgttggcatgctagctttatctgttcgggcaatacgatgcccattgtacttgttgactggtctgatattcgtgagcaaaaacgacttatggtattgcgagcttcagtcgcactacacggtcgttctgttactctttatgagaaagcgttcccgctttcagagcaatgttcaaagaaagctcatgaccaatttctagccgaccttgcgagcattctaccgagtaacaccacaccgctcattgtcagtgatgctggctttaaagtgccatggtataaatccgttgagaagctgggttggtactggttaagtcgagtaagaggaaaagtacaatatgcagacctaggagcggaaaactggaaacctatcagcaacttacatgatatgtcatctagtcactcaaagactttaggctataagaggctgactaaaagcaatccaatctcatgccaaattctattgtataaatctcgctctaaaggccgaaaaaatcagcgctcgacacggactcattgtcaccacccgtcacctaaaatctactcagcgtcggcaaaggagccatgggttctagcaactaacttacctgttgaaattcgaacacccaaacaacttgttaatatctattcgaagcgaatgcagattgaagaaaccttccgagacttgaaaagtcctgcctacggactaggcctacgccatagccgaacgagcagctcagagcgttttgatatcatgctgctaatcgccctgatgcttcaactaacatgttggcttgcgggcgttcatgctcagaaacaaggttgggacaagcacttccaggctaacacagtcagaaatcgaaacgtactctcaacagttcgcttaggcatggaagttttgcggcattctggctacacaataacaagggaagacttactcgtggctgcaaccctactagctca

SEQ ID NO: 498 - DNA, 1911 bp, Zea mays
  source: /note="Zea mays BAC clone full insert sequence contig bacm.pk155.l13.fis62"
ggatcgattccatagaaggggataagttttggacctaaattagtagattgggcatgttcgttgcgaaaaacgaagaaatggttccggtggcaaaaactcgtgcttgtatgcaccccgacacccgttttcggaatgggtgacgtgcggcaacgaaattgcgcgaaaccaccccaaacatgtgttttggacctaaagtagtgaattgtgagtgttcgttgcgaaaaacgaagaaatggttccgatggcaaaaacttgtacttgtatgcaccccgacacccgttttcggaataagtgacgtgcaacaacgaaattgcgcaaaaccaccctaaacatgagttttggacctaaagtagtggattgggcatgttcgttgcgaaaaacgaagaaattgatccggtggcaaaaactcgtgctttgtatgcaacccgacacccgttttcggaatgggtgacgtgcggcaacgaaattgcgcgaaaccaccccaaacatgagttttggatctaaagtagtggattgggcatgttcgttgtgaaaaacgaagaaatggttctggtggcaaaaactcatgctttgtatgcaccccgacacccattttcggaatgggtgacgtgcggcaacgaaattgcgcgaaaccaccccaaacatgtgttttggacctaaagtagtggattgggcatgttcgttgcgaaaatcgaagaaatggtttaggtggcaaaaactcgtgctttgtatgcaccgcgacacccgttttcggaatgagtgacgtgcgccaacaaaattgcgcgaaactaccccaaacatgagttttggacctaaagtagtggattgagcatgttcgttgcgagaaatgaagaaatggttccggtggcaaaaactcgtgctttgaatgcaatccaacacccattttcggaatgggtgacgtgcggcaacgaaattgcgcgaaaccaccccaaacataagttttggacataaattagtggattgggcatgttcgttgcgaaaaacgaagaaatggttccggtggtaaaaactcgtgcttgtatgcaccccgacacccattttcggaatgggtgacgtgcggcaacgaaattgcgcgaaaccaccccaaacatgagttttggacccaaagtagtggattgggcatgttcgttgcgaaaaacgaagaaattgatccagtggcaaaaactcgtgcttgtatgcaccccgacacccgttttcggaatgggtgacgtgcggcaacgaaattacgcgaaatcaccccaaacatgtgttttggacctaaagtagtggattggcatgtccgttgcgaaaaacgaagaaattgatcctgtggcaaaaactcgtgctttgtatgcaccccgacacccgttttcggaatggtttacatgtggcaacgaaattgcgcgaaaccacatcaaaacatgagttttggacctaacgtagtggattgggaatgttcgttgcgaaaaacaaagaaatggttccggtggcaaaaactcgtgcttgtatgcaccccgacacccgttttcggaatgggtgacgtgcggcaacgaaattgcgcgaaaccaccccaaacatgtgttttggacctgaagtagaggattgggcatgttcgttgcgaaaaacgaataaattgatccggtggcaaaaactcgtgcttgtatgcaccccgacacccaccccgacacccgttttcgaaacgggtgacgtgcggcaacgaaattgcgtgaaaccaccccaaacatgagttttggacctaaagtagtggattgggaatgttcgttgcgaaaaacgaagaaattgatccggtggcaaaaactcgtgctttgtatgcaccgcgacacccgttttcggaacggttgacgtgcggcaacgaaattgcgcgaaaccaccccaaacatgagttttgga

SEQ ID NO: 499 - DNA, 1311 bp, Zea mays
  source: /note="Zea mays BAC clone full insert sequence contig bacm.pk155.l13.fis63"
actataaataccatccttttccaaagtaaaacttgatagaaacaaatgttggatagatcgtaggacgatcaggatagacctaggacgtgaagccttaggaggatagaggggtagttaggtggctaagtgattgagccctacatgctactataagggatgggggttcttccctattccctttacgttgatgtgaggtcgttcaggacgagcatgcatgcattcttactcaaactaatggataattgggaaagaactttaatacaaactgatgaccaattaagtaccccagtaccattgttgtagttagagagaggctgagttgtgattcctttttctttttataattctttttcttttacttacgcttaaccgtacacagattctcacggatcctcggacgaagggaatgcactgtcccacactgacgggcttgcacgagagggctttccccgtattttgtgggaggtacttcagggggctggttacacgacgcctcctcagtacgcggtgcagcagttcgagaagcaccgagtgccccgctgtagggtgaggatgaccctggacctcatcccctatagccaggctggcattcgctggactctaagtcctttggataccgggctgaggatacgatcgaggcaattgcccttcacggattgaccactttctgcggattccaccccttggagctgtccactcaccccattggcttgttccccgctgagaaggaggacgacccaatgtggaaggaccgagtcgagcatgccaaggacatctgggctatctacccaggtcagacggctcacttgacagtacggtgcatgaatgccctgtaccgtctgcaagtgatgcgtggtgaggcaatgtcccatctgatggcattgttggaggcaactaagatcaccctagataacatagaggagcttgtggttgacttgtccactgagatggtggaaaaagacttacaggtggagcagctgtcaaatgagatccaagagcttgaggaactggtgggaacaagggagaacaccatcgaggttctcgaggatcaacttatcaacacccagcagcagcttgccgaggctaacgagcacctggatatgcatcaccaggagatccaggacatggaggccaatgaggacgtcgacattgagggaggagaggagcctgcctccagcttggacactgctggctcagggagaccaccttcccccgagtcgagtgttgcctcgttcgctcactaggtatcaggggtagagctagaagtcggtgatggtagaactcctcgaagctagcttagcttttgcaccc

SEQ ID NO: 500 - DNA, 2125 bp, Zea mays
  source: /note="Zea mays BAC clone full insert sequence contig bacm.pk155.l13.fis64"
cccaaacatgtgttttggacctaaagtagtggattcagcatgtttgttgcgaaaaacgaagaaattgatccggtggcaaaaacccgtgctttgtatgcaccccgacacccattttcggaatgagtgacgtgcggcaacgaaattgcgcgaaaccaccccaaacatgagttttggacctaaattagtggattgggcatgttcgttgcaaaaaacgaagaaatggttctgttggcaaaaactcgtgcttgtatgcaccctcacacccgttttcagaatgggtgacgtgcggcaatgaaattgcgcgaaaccaccccaaacatgagttttggacctaaagtactggattgggcatgttcattgtgaaaaacgaagaaatggttccggtggcaaaaactcgtgcttctatgcacccggacacccgttttcggaatgggtgatgtgcgacaacgaaattgcgcgaaaccaccccaaacatgtgttttggacctaaagtagtggatttgggcatgttcgttgcgaaaaacagagaaatggttccggtggcaaaaactcctgctttgtatgcaccgcgacacccgttttcggaatgagtgacgtgcgacaacgaaattgcgtgaaaccaccccaaacatgagttttggacctaaagtagtggattgggcatgttcattgcgaaaaacgaagaaatggttctagtggcaaaaactcgtgcttgtatgaacccccgacacccgttttcggaatgggtgacgtgcggcaacgaaattgcgcgaaaccaccccaaacatgagttttggacctaaagtagtggattgggcatgttcgttacgaaaaacgaagaaattgatctggtggcaaaaacttgtgctttgtatgcaccccgacacccgttttcggaatgggtgacgtgcgacaacgaaattgcgcgaaaccaccccaaacatgagttttggacttaaagtagtggattgggcatgttcgttgcgaaaaacgatgaaatggttccggtggcaaaaactcgtgcttgtatgcaccccgacacccgttttcggaatgggtgacgtgcggcaacgaaattgcgcgaaaccaccccaaacatgtgttttggacctaaagtagtggattgggcatgttcgttgcgaaaaacgaagaaatgattccggtgacaaaaactcgtgctttgtatacaccccgacacccgttttcggaatgggtgacgtgcggcaacgaaattgcgcgaaaccacaccaaacatgagttttggacctaaagtagtggattgggcatgttcgttgcgaaaaacgaagaaatggttccggtggcaagaactcatgctttgtatgcaccccgacacccgttttcggaatgggtgacgtgtggcaacgaaattgcgcgaaaccaccccaaacatgtgttttggacctaaagtagtggattgggcatgtttgttgcgaaaaacgaagaaatggttccagtggcaaaaacttgtgctttgtatgcaccgcgacacccgttttcggaatgagtgacgtgcggcaacgaaattgcgcgaaaccaccccaaacatgagttttggacctaaagtagtggattgggcatgttcgttgcgaaaaacgaagaaatggttccggtggcaaaaactcatgctttgaatgcaatccaacacccattttcggaatgggtgacgtgcggcaacgaaattgcgcgaaaccaccccaaacatgagttttggacctaaattagtggattgggcatgttcgttgcgaaaaacgaagaaatggttccggtggcaaaaactcgcgctttgtatgcaccgcgacacctgctttcagaatgggtgacgtgcggcaacgaaattgcgcgaaaccaccccaaacatgagttttggacctaaattactggattgggcatgtttgttgcgaaaaacgaagaaatggttccggtggcaaaaactcgtgctttgtagcaccccgacacccgttttcggaatgggtgatgtgcgggcacgaaattgcgcgaaaaccccccaaacatggagtttggaacttaaagttattggattgggcatgttcctttgcaaaaaacgaaaaaatggttccgggggcaaaaaactcgggctttaaag

SEQ ID NO: 501 - DNA, 1757 bp, Zea mays
  VARIATION (1749)..(1749): /replace="c" or "g" or "t"
  misc_feature (1749): /note="Nucleotide given in the sequence has no preference with respect to those in the annotation for said position"
  source: /note="Zea mays BAC clone full insert sequence contig bacm.pk155.l13.fis65"
gagccttgcgcaggtgcaacaccttgccctccttgccagggatcgcaaaacctggcggctagtgtacgtagacctcctcctttaagtcgccgttaaggaacgccgacttgacgtccatgtgatgaacgtgccagccctgctgggctgacagcgcaaggaggagtcgcacggattccatccgtgccacggaggcgaaagcatcgttgaagtcgatcccctcctgctgtagttaaccgcgtgccaccaagcgagccttgtgcttgacgatggcgccggcttcatccctcttcagtttgaacacccatttaagggtgatcgcgcgatgaccatgagggagatcagcgagctcccaggtgcggttcgtctcaaccgcgtccatctccgactgcatcgcggcccgccaagccgcatgtttctcggcctccgcgaaagaccgaggctcaccatcgtcgcatgcaagatggaactctcctgccagaatgcgagatgcagggcctggcaccgacgggtcgatgagaaggccctccacccttcgataccacaacggctcgtcgtcgtagcacgcgtcgacgcgctcctcgtcgcgggacagaggggtcacgagctccactgggtcgtgctcgacacgagctggtgtcggagaagacgtttccggagagggtaccgtcggtgctggagtacgtggtggcgaagagctcgctgtagccagagtcgtggctggagtgcgtggtggtgaagagctcgttgtagcaggagctggagagtttggcgctggagtcggtggagacttgggggctggggtagacctgctcggagaagagttgcctactcccccagctccctcaaagtggacgtactcgatggtgaagtcgtacgtcggagtcgtgccgtcgtccaccgccttgtcccacgcccatcctcgcccttcgtcgaacactacgtcgcgcgccgtgcgcacacgctgtgttcttgggtcaaggatgcggtaggccttcgagccctccgcgtagccaatgaacatccccggggtgctcctatcgtcgagcttgctgatgtggccaagctccttggtgaacgtgaggcagccgaagacccgtaggtgagagaccgccggcttgcgcccatgccaagcctcgtacggtgtcatcccgttgagagccttggtgggcgagcggttgaggatgtaaaccgctgtcaccaccgcctctccccagaagacagctggcattcctctctgcttgaggagagcccgagccatccccacaaccgtctggttgcgccgctcgacgacgccgttctgctgcgggctgtacggcgcggagtagtggcgctgaacgccctcatccgcgcagtacgacgcgaactcagccgccatgaattcgccgccgttgtcggtgcgcagcgcgcgcagcttgcggccgcgctccgcctccgcagcgacctgcacacgcctgatggcgttcgcagcctctcccttgctgccaaggatcatcacccacatgtagcgggagagatcgtcgacgagcagcaagaagtagcgtcgtcctcctgggtgtggctggtgtcaccgggccacacaagtccccatgcacgagctcgagcctctccttggctcggaagctcgactgctgggggaaaggggagtcgtctctactttgttcacacgcagacatcgcagaattgctccacagggtcaagcacggcaggcctcgtaccatctccttggcactgagccgctccaaagctcaaagttaaag

SEQ ID NO: 502 - DNA, 1773 bp, Zea mays
  source: /note="Zea mays BAC clone full insert sequence contig bacm.pk155.l13.fis66"
aaaaaaacacaatgcgaccagcaacaaatgacgcgaaagcacacaaattcaacaatgcagattattgaaagaaggtgcgaggctcaaaagggtgctggtatacggtctaacctgaatttttatgtggttttgtggactgtaggagaaaaaaacacttgataaactcaccgatcaacctggaaatctgataccaattgatatagctgaggtgcccgatctttcggcgagtagagataattccgatttggcggaagatgacccttgcgatccgactacgacgagcaagcccgaggcgccaatgcaaatgctgaaccaactccctgtggttaccgaccttgctgatgcgagatcggcctgatcacgaagatcgtttcctgtgcgcaatcgaagaacgaacaaaaaaatgatgcgagcaatctaatctattactcgagggtggagttctgaatacacgaagacagcgcagatttgcgcgtgttcgagagtagctaaaggtaacgtaaaacaaaactcgaaaacaaaggaggcgcagctcctggataaatagagaggggcgcagcccctaggggcggccaaccctaggtcgtccactatgggccgcagttgggctggttgtctattcttctgggccctcattcttcagtagcatgacgaagttaagatctctggcacgggcccgagtgattggcccagctaatgaaggaagtggcgcttgatgtggaggtgctgctggtgtagtcgtactcatagtgatgtccaaatcagaacatgcccaatccactactttaggtccaaaactcatgttcggggtggtttcgcgcaatttcgttgccgcacgtcacccattccgaaaacgggtgtcgcagtgcatataaagcacgagtttttgcaaccggaaccatttcttcgttttttgcaacgaacatgcctaatccactactttaggtccaaaacacatgtttggggtggtttcgcgcaatttcgttgccgcacgtcacccattccgaaaatgggtgtcggggtgcatacaaagcatgagtttttgccaccagaaccatttcttcgtttttcacaacgaacatgcccaatccactactttagatccaaaactcatgtttggggtggtttcgcgcaatttcgttgccgcacgtcacccattccgaaaacgggtgtcgggttgcatacaaagcacaagtttttgccaccggatcaatttcttcgtttttcgcaacgaacatgcccaatccactactttaggtccaaaactcatgtttagggtggtttcgcgcaatttcgttgttgcacgtcacttattccgaaaacgggtgtcggggtgcatacaagcacaagtttttgccaccggaaccatttcttcgtttttcgcaacgaacactcacaattcactactttaggtccaaaacacatgtttggggtggtttcgcgcaatttcgttgtcgcacgtcacccattccgaaaacgggtgtcggggtgcatacaagcacgagtttttgccaccggaaccatttcttcgtttttcgcaacgaacatgcccaatctactaatttaggtccaaaacttatgttttgggtggtttcgtgcaatttcgttgtcgcacgtcacccattccgaaaacgggtgttggattgcattcaaagcacgaatttttgccaccggaaccatttcttcgtttttcgcaacgaacatgcccaatccactactttagttccaaaactcatgtttggtgtggtttcgcgcaattttgttgtcgcacga

SEQ ID NO: 503 - DNA, 2144 bp, Zea mays
  source: /note="Zea mays BAC clone full insert sequence contig bacm.pk155.l13.fis67"
ctcacgtcacccattccgaaaacgggtgtcggggtgcatacaagcacgagtttttgccaccggaaccatttcttcgtttttcgcaacgaacatgcccaatccactaatttaggtccaaaactcatgtttggggtgtttcgggcaatttcgttgccgcacgccacccattccgaaaacgggtgtcgggttgcattcaaagcacgagtttttgccactggatccatttcttcgtttttcgcaacgaacatgcccaatccactactttagttccaaaactcatgtttggggtggttttgcgcaatttagttgccacacgtcacccattccgaaaatgggtgttggggtgcatacaaagcacgggtgtcggggtgcatacaagcacgagtttttgccaccggaaccatttcttcgtttttcgcaacgaacatgcccaatccactactttaagtccaaaactcatgtttggggtggtttcgcgcaatttcgttgccacacgtcacccattccgaaaacgggtgtcggggtgcatacaagcacgagtttttgccaccggaaccatttctttgtttttcgcaacgaacatgcccaatccactactttaggtccaaaactaatgtttggggtggtttcgcgcaatttcgttgccgcacgtcacccattccaaaaacggatgtcggggtgcatacaagcacgagtttttgccaccgaaaccatttcctcgtttttcgcaacgaacatgcttaatcctctactttaggtccaaaacacatgtttggggtggtttcgcgcaatttcattgccgcatgtcacccattccgaaaacgggtgtcggggtgcatacaaagcacgagtttttgccaccgaaaccatttcttcgtttttcgcaacgaacatgcccaatccaatactttaggtccaaaactcatgtttggggtggtttcgcgcaatttcgttgtcgcacgtcacctattccgaaaacgggtgtcggggtgcatacaagcacgagtttttgccaccggaaccattttttcgtttttcgcaacgaacattcccaatccactactttaggtccaaaacacatgtttggggtggtttcgcgcaatttcattgtcccacgtcacccattccgaaaacgggtgtcggggtgcatacaagcacgagtttttgccaccggaaccattttttcttttttcgcaacgaacattcccaatccactactttaggtccaaaacacatgtttggggtggtttcgcgcaatttcgttgccccacgtcacccattccgaaaacgggtgtcggggtgcatacaagcacgagtttttgccaccggaaccatttcttcgtttttcggaacgaacatgcccaatcctctactttaggtccaaaactcatgtttcgggtggtttcgcgcaattcgttgccgcacatcactcattccgaaaacgggtgtcggggtgcatacaaagcaagagtttttgccaccggatcaatttcttcgtttttcgcaacgaacatcctgaatccactactttaggtccaaaacacatgtttggggtggtttcgcgcaatttcgttgccgcacgtcacccattccgaaaacgggtgtcgggggtgcatacaagcacgagtttttgccaccggaaccacttcttcgtttttcgcaatgaacatgctcaatccactacattaggtccaaaacacatgtttggggtggtttcgcgcaattttgttgtcgtacgtcactcattccgaaaacgggtgtcgcagtgcatagaaagcacgagtttctgccaccggaaccatttcttcgtttttcgcaacgaacatgcccaatccactactttaggtccaaaactcatgtttggggtggtttcgcgcaatttcgttgctgcacgtcacccattccgaaaacgggtgtcgggggtgcatacaagcacgagtttttgccaccggaaccatttcttcgtttttcgcaacgaacatgctcaatccacttctttaggtccaaaactcatgtttggggtggtttcgcgcaatttcgttgccatacgtcactcattccgaaaacgggtgtcgcagtcatccatctagggaacgatcctcgcccgcgatggggacgtcccactccccgaatgagtgttcggc

SEQ ID NO: 504 - DNA, 1711 bp, Zea mays
  VARIATION (1651)..(1651): /replace="c" or "g" or "t"
  misc_feature (1651): /note="Nucleotide given in the sequence has no preference with respect to those in the annotation for said position"
  VARIATION (1671)..(1671): /replace="c" or "g" or "t"
  misc_feature (1671): /note="Nucleotide given in the sequence has no preference with respect to those in the annotation for said position"
  source: /note="Zea mays BAC clone full insert sequence contig bacm.pk155.l13.fis68"
agtctgacactatcttcttcagcataccatgaagacaaacgatccgagacatatacaactctgccaatactgcactgctgtagttggtcttgactggtatgaagtgggctgacttggtcaaacggtccactactacccaaatggaatcatagccggctcgagtgcgaggcaatccgactatgaagtccataccgatttcatcccatttccactgaggaatttgcaacggttgcaacaatccagcaggtctctggtgctctgctttgatccgtcgacaactatcacacatagccacatgctctgcgatttccctcttcattccgtaccaccagaatttcttcttcagatcctgatacatcttctcactgccagggtgaatcgaataggctgtctcatgggcttccttgaggatcaactcccgaatggattggacattgggaacacacaagcggtctttaaaccatatcacaccttctgcatcttcccgaaaatctttgcctctgccatctagaatcagtcgccggatctcactgatcttctcatcattcttctgcgcttttttgatttcccgctccagggtaggttccaactcaacggtgactcctcgcgaattgtttagaaatccgagactcaacttgtcaaactccttggccaactcataaggcatcggacgagcgaccatcagattgatctgactcttcctgctcaaagcatctgccactacgttcgctttgcctggatggtaatggatctccaactcatagtctttgatcagctctaaccatcttcgttgcctcatattcagctctgactgagtgaatatgtacttcagactcttgtggtctgtgtaaacatcgcatttctgtccatacagatagtgcctccatgtcttcagtgcgtgaaccactgctgccaactctagatcatggattgggtaattcttctcatgaaccttcagttgtcgggacgagtaagccacaactcttccctcttgcatcaacacgcatcccaaaccagtgtaacaagcatcataatacaccgagaagggcttgtgcacatcaggcaagactaggacaggcgctgttgtcaacttctctttcagcgcttcgaaggcctcttgacatttctgggtccacttgaactcaaccttgttgcctagtaacgctgtcattggtttcgcaatcttcgaaaacccttcaatgaatcgccgataatatccggtcattccaatgaaactcttgattcctcgagcatctgttggcgctttccagttcagaatgtctgccactttcttcggatccacagccaatccttctttgttgattatgtgacccaagaacagaacttcattgatccagaattcacatttgctcaactttgcatacaactggtgctctcgcaatctctgcaataccatcctcaaatgatctgcatgttcttcttcgctttgagaatagatcagaatgtcatcaatgaataccaccacaaacttgtcaagataatccatgaatacactgttcatcaagttcatgaagaaggccggtgcattggtcaaaccaaaagacatcacagtgaactcatacaaaccatacttggtaatgaatgccgtcttcggaatgtccgaaggtcgaatcctgagctgatgataccatgacctcagatctatcttgaagaacacactggctccttctcactggtcgaacagatctta

SEQ ID NO: 505 - DNA, 1896 bp, Zea mays
  source: /note="Zea mays BAC clone full insert sequence contig bacm.pk155.l13.fis69"
attgcgcgaaaccaccccaaacatgtgttttggacctgaagtagaggattgggcatgttcgttgcgaaaaacgaataaattgatccggtggcaaaaactcgtgcttgtatgcaccccgacacccaccccgacacccgttttcgaaacgggtgacgtgcggcaacgaaattgcgtgaaaccaccccaaacatgagttttggacctaaagtagtggattgggaatgttcgttgcgaaaaacgaagaaattgatccggtggcaaaaactcgtgctttgtatgcaccgcgacacccgttttcggaacggttgacgtgcggcaacgaaattgcgcgaaaccaccccaaacatgagttttggaccaaaattagtggattgggcatattcgttgcgtaaaacgaagaaattgatccggtggcaaaaactcgttctttctatgcaccccgacacccgttttcggaatgggtgacgtgcggcaacgaaattgcgcgaaaccacaccaaacatgagttttggacctaaagtagtggattgggcatgttcgttgtgaaaaacgaagaaacggttccggtggcaaaaactcgtgctttgtatgcaccgcgacacccgttttcggaatgagtgacgtgcggcaacgaaattgcgtgaaaccaccccaagcatgagttttggacctaaagtagtggattgggcatgttcgttgcgaaaaacgaagaaatggttccggtggcaaaaactcatgctttgaagcaacccaacacccattttcggaatgggtgacgtgctgcaacgaaattacgcgaaaccaccccaaacatgagttttggacctaaattagtggattaggcatgttcgttgcgaaaaacgaagaaatggttccggtggcaaaaactcgtgatttgtatgcaccccgacaccctttttcggaatgggtgacgtgcggcaacgaaattgcccgaaaccaccccaaacatgagttttggacctaaattagtggattgggcatgttcgttgcgaaaaacgaagaattggttccggtggaaaaaactcgtgctttgtatgcactgcgacacccgttttcggaatgagtgacgtgcggcaacgaaattgcgcgaaaccaccccaaacatgagttttggacctaaagtagtggattgggcatgtttgttgcgaaaaaggaagaaatggttccggtggcaaaaactcgtgctttgaatgcaaacaaatacccattttcggaatgggtgacgtgcagcaacgaaattgcgcgaaaccaccccaaacatgagttttggacctaaattagtggattgggcatgttcgttgcgaaaaacgaagaaatttccagtggcaaaaactcgtgctttgtatgcaccccgacacccgttttcagaattggtgacgtgcggcaacgaaattgcgcgaaaccaccccaaacatgtgttttggacctaaattaatggattgggaatgttcgttgcgaaaaacgaagaaatttccagtggcaaaaactcgtgctttgtatgcaccccgacacctgttttcagaattggtgacgtgcggcaacgaaattgcgcgaaaccaccccaaacatgtgttttggacctaaagtagtgtattgagcatgttcgttgcgaaaaacgaagaaattgatccggtggcaaaaacttgtgctttgtaagcaccccaacacccgttttcggaatgggtgacgtgcgctaacgaaattgcgcgaaaccaccccaaacatgagttttggacctaaagtagtggattgggaatgtttgttgtgaaaaacgaacaaatggttccggtggcaaaaactcgtgcttgtatgcaccccgacacccgttttcggaatgggtgacgtgcggcaacgaaattagtggattgggtatgt

SEQ ID NO: 506 - DNA, 1781 bp, Zea mays
  source: /note="Zea mays BAC clone full insert sequence contig bacm.pk155.l13.fis70"
ggcgcgtatacgactcctatggggagtgggtcctaccacacgggcgggcgaggatcgttaccttgattgaggtcctctttgagcagttgaggggtgccgaggtgttctccaaaattgatttgaactctggttatcatcaattgaggattcgtgaggaggatattaagaagactgccttctgcaccaggtatgggcattatgagttcatagtcatgtcctttggcttaactaatgcccctgctgcgtttatggaagcaatgaataggatgctgcatgaattcttggacgattttgtggtcgtattcctagatgatattttgatttattcaaagaccgaggccgagcatgatcagcatctccgtctcgttctgggtgccctaaggaagaatcaattctatggcaagttgaagaagtgtgccttttggctatctgaagtggctttcctggggcacgtgcagcagggtattgcggttgaccccaagaatgttgcggctgtagtggagtggaagagaccttctagtgtctctgaaatccgaagtttcttggggcttgctgggtattatcggcgtttcgtaccaaatttttccagcattgctaagcctttgactaggctcttggggaaggatgttcccttcgtctggtccggcgattgtgagatcagttatcagtcattgaagagcaagttggtggacgcccctatcctagctttgcctgagagcagtaagcgtttcatagtttatacggatgcttcgcgtattggtcttggctgtgtgctaatgcaggaaggcagggtgattgcttatggctcaaggaagttgaggaagcatgaggggaattatccaactcatgatctggaattggctgcggtggtttttgctctaaagtcgtggaggcattacctttatggtgaggcttgtgacattttcactgatcacaaaagtctcaagtatatttttactcagaaggagctgaatttgaggcagcgtcggtggctagaattgattaaagattatgatttgtccattcattatcacccggggaaggctaatgtggtggcggatgcccttagcaggtccggggttccaaaggtggccttgccgttggtcgctgatctggaccgtttggggatcgctttgtgttatgtcggcaccgctagcaaggagactcagatgcttattcaatcctctcttatagagagagtgcgtgcggctcagcagcaggatcgtcttttgcaggaagcccgaaggagggttggtgatggtaaaccgcgggagttcaccattgatgagaatgatttggttcgtttcaggggccgtctttgtgtgcctcagaaaccagaggtgaagctggatatcctgcgagaagctcataaaacgccttacaccgtccatcctggcaaaaccaaaatgtaccgagatttgaagcaaaacttctggtggaagcggatgaaggttgacatttctaagtatgtggccgcctgtgaagtatgtcagcgcgtgaaggccgaacataagcggcctgcaggtttgctgaagccattggaaattccagagtggaaatgggagcatatcaccatggattttgtggtgggtctacctcgttcccctcgtggcagggatgctatttgggtggtagtggatcgcttgactaagtctgcacattttattcccatgaagaccacgaattcagcttcagatttggttcccttgtatatgaaggaagtagtcaggcttcacgggcttctaaggaaaagataccgtcgcctccacatggtattagaa

SEQ ID NO: 507 - DNA, 3394 bp, Zea mays
  VARIATION (1206)..(1206): /replace="c" or "g" or "t"
  misc_feature (1206): /note="Nucleotide given in the sequence has no preference with respect to those in the annotation for said position"
  source: /note="Zea mays BAC clone full insert sequence contig bacm.pk155.l13.fis71"
aaagataatttctctaccaacgctgtacttgccaaattgttgcagctgccactatcgatgatgatgcgaatcgaccgttcgtgcacgacgcccttggtatggaatagagtgtgtcgctgatttttttcggcctgggcaacctgtgtgctgagaacatgctgcacaacaagactctcatacctatcggcgtcgatgggatcaacgtggacttcctcattttctgcatggttagtggcaatcatagcatgactagtttcctcagaatcactggctgaagagtactcaccattgtcacgtataagcaaggtacgcttgtttgggcagtcccgaatcatgtgcccaaaccctctgcaacgatggcactgaatatcccgtgtacgtcctgtggaagaagcggcgcctttggcagggggtgccactggcttggccggccctgtgcgcgatgtagtgctaggcgtaggaggtgcagggctggaaggagttgagctgtgtgttggtccccggcctgcaaaagagttagtatatgtctttgatcgtcgtccctgcacttcacgttcagctttgcaagcatattcaaacaatgtggttatatcaaaataatccttataatcaagtatatcctgaatttccctgttcaaaccaccacgaaaacgcgccatagcagcgtcatctgactcaaccaaaccacaacgaagcatacccttttgcaactcctggtaatattcctcaacagattgtgaaccttgttgaaaacgctgcattttgttaagcaaatcacgagcataataggaaggaacaaatctgtggcgcatggcagtttttaattgggtccaagtaatgacactgttaatgggaagtttttgtttatactcacgccaccaaattaaagcaaaatcagtaaattcactaatggcagccttcacttggctattagcaggaatatcatggcatgaaaatttctgttctacctctaattcccaatcaagatatgcagcaggatcatatttaccattaaaagatggaattttaaatttaatcttagaaaataagtcattagggggatgacgaaccacacgacgtgcacgaccacggcgatctccatcgtcctgctcagtgtcaccgccgtattcctgctccatctttgtggtcaatgcatcaaggcgtgcaaggatggtgtcgagtgtggtgcgagtcgccgttttgagacaggtcaagttggttgaaacgctcggtcgtcgaagtgatcgttgaaatcaagccgttcatgcatcgtcctaatgtcagcagcaagtccatcaacttgtccccttacttcctgcaactgggcgtccaccatgtcgtgtgctcctgccatagttagcgcaaacaccaaaagaagaaaaaccaacgacaaaaacaggggtgtactgctcacaaggcgctcacactagtgctgttatcaagttcttatccgttcttaccaagccacagtggtgaactgcaatcaacaggtggaaccggtgaaagattggatgagcgattgcgtggagaaacagaaacctgctcgtcgtagaaatatgtggagttgtgggtaggctgcactcaagtcaaggattagcacgatcaaacaataatgcaaagttgaattatagtgcaaaacacgaaactatattgctggccacaggtgcaaaagatggatggaactagcagaatggcagtaccgtaaatattgtactagtgatgccaaaaaggcactagtagaaatcacaggtgattttgtttttcttttttgtatgatttttttgatatttttctcagcacaagaagcaacaagataggagctagacgaagtttcacctaaaacagagatcagatgtggtctacagaaaatcaggaagttctctgaaaagcgtgcgagaactttgacggatttttttctttattttcctgaatttttttgacaattttgtcgaacccaaacagaccgaaggtgagtttggccgggctcagaatggtgtcaacaagctcctgtaaaaatttcagattttttggacacccgagcgaaaagttatgcccgttttacggaaggtacctcaagttatgttctaaaaacgaccggaatgaagcaactgtatcctttctccttcgttatctttttttttctgttttttttttacgtaaccgaaggagaaaaacaaggaagcggccgttgactcggtatgtttttttttctgttttttttttcgtaaccgaaggagaaaatcaaggaaacggccgttgactcggtttgttttttctgtttttttttttttgacgtaaccgaaggagaaaaataaggaaacgatgttgactcggtttgtggtgtgatcaaacgggagatggtggcggcgctagggtttgaatggtggaagaacacaatgcaaccagcaacaaatgacgcgaaagcacacaaattcaacaatgcagattattgaaagaaagtgcgaggctcaaaagggtgctgggataagatctaacctgaatttttatgtggttttgtagactgtaggaaaaaaaacgctcgataaactcaccgatcaacctggaaatctgataccaattgatgaagctgaggtgcccgatctttcggcgagtagagataattccgatttgtcggaagatgacccttgcgatccgactacgacgagcaagcccgaggcgccaatgcaatcgctgaaccaactccctgtggttaccgaccttgctgatgcgagatcggcctgatcacgaagatcgtttcctgtgcgcaatcgaagaacgaacaagaacaagatgcgagcaatctaatctattactcgagggtggagttctgaatacacgaagacagcgcagatttgcgcgtgttcgagagtagctaaggctaacgtaaaacaaaactcaggaaataaaggaggcgcagctcctgaataaatagagagggggcgcagcccctaggggcggccaaccctaggtcgtccattatgggccgcaattgggctggtcgtctattcttccgggccttcgttctttaacaacatgatgtagttcaattctcttgcacggggcccgagtcactggcccaggtggaaggggtggcgcctgggctggagaaggtgctgctggtgtagatgtgctcgtgttggtgttgatgtccgcatcagacgcagctcgtgtaaaattacattagtgccctttacatttatcaataactctacagtaattcttcagggtctaatttggcttttcatcttttaagtcggttccccttttctactgtcatgccgaagcttatctacgcatagcttcgtgatgatcttttccttcgtcacaatcgccttccgtcccactcaagcttcgtcttgaccatactcttatatactcgtaatccaattccgaa

SEQ ID NO: 508 - DNA, 2464 bp, Zea mays
  source: /note="Zea mays BAC clone full insert sequence contig bacm.pk155.l13.fis72"
aggcaagtgttgaatgatgcctccaatataacattcggttgggtcaaaaatgtccatatcacctgccatgtttagtaaagacaagaaacaataaaaaatatctttgattctataaactactaggaatcattgttgtaatctcccactctcaaactggttaaacaagttcttacaagttctcaccatgcaaagcaggaggcgctggcaaacagcatgaacaacaacaacagtggctgctagcacaacctggtggtgttgtagaaaattttgtggatttataggtggctgttcaaacaatagttccaaggaatagctagtaccacgttagccacaacaagttgaataaacgttccacaatggtgttgtgctggtcctagtccaaaccgtaatagagacgcgagccgttacacaaatagtatcaccaaaagctcagaacaacaatctgatttctgaaactataaaaagaaggcacacaaactgccttttgttttgttgcacttacaaattttatctaccaaaattcagaactggtttttttttctctcttttgttttgcacgtgtcttttttttgttttgctgattagtgcggctttttttgtgcactcgccttttgctttctcttctttttggttgaattgcagcaagaggtctaaactggtgattgaaacaaggtggcgcgaactcgaaactctagcggtaagaaaactttagaccagcaactcgacccaaatgcagcaaccgtgaattcaacaagtcgaaaactaagtagtaaagcaaaggctcaaactgtttttaggtgaatttctgctctaaatatatctttgggcaaaagtggactgtaggtaaacaaaacaaggaagattgagatctctcaccgagcaacctgaaatttgataccacttgataaacccaacgggtagaagggcgcccgatctttcgatgagagatgatggaggtggaaaacttgttggagaacgacgttggctgcccgactaccacaaccaagatggtgtggcgccttgagcgacaggtacaccgtctcctgataactacgatttggggtggaggtcgacgttgtgctatccgactacaacaaccacaagggtgctgcgccttagcgatagttacaccggctcctgttgttgctgctcttgccgtgccaagaacagccttgaacctgcaagcaatcgagaacaagcaagaacaagataaaacgcagacgctcacagatctgatagatttggggttctgtttcaagtatccgggtggtctagccgacacacgcgtttataaggaagtagcaaaggctaaacttacatcaaacaaaaacccaagttctttggtggctgctagttgcttaaatagaggaataggaaggagttctaatggagaacgaaactctctcggcagtttctggacgcctcgtttggtttctgtctttgattcttgatgcacatgaaagtagacgaagagagctttccaacaagtagttatttgcactaaacaaccttgggagtggaaagttatgctccatttaatttggtgcatgctgcagttacgaaattgacttgggtagagcaggagttcactcggcagtttctggacacttagtctctgatctctcgttgattcttgatccactagaaagtagacaaagagacctttccaacaagtgcttatttgcattaaacaaccttgggagctgaaagatatgccctcttaaacttgcacttgttgtagtttcgaaatcccctcaagtggagcagcttttattgccttgttgccttctcaaattctagatggttcacctcccaaacaccttagaataataaagtaatcacaaggtattagtacctcatttaaggaatgattagcttcaacaacaaggaacgagttcacctgataattaaatttacgtgcacggactcgtttcagtggtccattattaaatggtgaaggaggtcgctggtgtggtgtattgatggcagtgatgtcctcatcagttccggtggcaaaaactcgtgcttgtatgcaccccgacacccgttttcggaatgggtgacgtgggacaacgaaattgcgcgaaaccaccccaaacatgtgttttggacctaaagtagtggattgagaatgttcgttgcgaaaaacgaaaaaatggttccggtggcaaaaactcgtgcttgtatgcaccccgacacccgttttcggaatgggtgacgtgggacaacgaaattgcgcgaaaccaccccaaacatgtgttttggacctaaagtagtggattgggaatgttcgttgcgaaaaacgaaaaaatggttccggtggcaaaaactcgtgcttgtatgcaccccgacaccctttttcggaataggtgacgtgcgacaacgaaattgcgcgaaaccaccccaaacatgagttttggacctaaagtattggattgggcatgttcgttgcgaaaaacgaaga

SEQ ID NO: 509 - DNA, 2381 bp, Zea mays
  VARIATION (2230)..(2230): /replace="c" or "g" or "t"
  misc_feature (2230): /note="Nucleotide given in the sequence has no preference with respect to those in the annotation for said position"
  VARIATION (2280)..(2280): /replace="c" or "g" or "t"
  misc_feature (2280): /note="Nucleotide given in the sequence has no preference with respect to those in the annotation for said position"
  VARIATION (2356)..(2356): /replace="c" or "g" or "t"
  misc_feature (2356): /note="Nucleotide given in the sequence has no preference with respect to those in the annotation for said position"
  VARIATION (2377)..(2377): /replace="c" or "g" or "t"
  misc_feature (2377): /note="Nucleotide given in the sequence has no preference with respect to those in the annotation for said position"
  source: /note="Zea mays BAC clone full insert sequence contig bacm.pk155.l13.fis73"
gctttgactgataatagatggccagatgggggtccgatatctctggaagtctgccggagctgttctaattgagtacctcagggtatgggacttgattcagggagttcatcttcatccgggggctcctgataggcacagatggcttcccacatcctctggggaatactccgccaaatctgcatataaacggtttctagctgggtcaactttgtttgaaccagctgagaggatttggaaaaggtggtctcctccgcgttgcaaattctttgtttggttggcctctcttgatagatgctgaactgctgacagactagctcgtctgggcctcgatcacccggaaagttgccctctttgcgatcaacacgaagaaacagtccaacacattttggtctcctgtgtttttgctagggatatttggtttcaagtcctaagcaaggtggggttgcagtccctttcccctagggctgccgttcttgttttccaggaatggtggaggaaggctaaaagcagggtgccaaagctccagaaaaaagggttcaactcaatagtgatccttgtggcctggtggttgtggaaacatagaaatgcatatgttcgatggtgcctctccaaacagcaacattgtcctacaacatatccatcaggatgctcatatgtggggaatgcccgggggctggggcagcagacattaggaggctatgtacttagcactgggactctgggagtgcttgtttgctgctggcttgtagtagtgtggtttcctcatggatagttatgtgtgtgcctgttcttggccgccgtaaggaggccttttttgtactgttttggccatctaaagcatctttctcttcttaatataatgatgtgcaatttgtaagtagagggactctaactctcatcaagaggatgacactatgagttggggcaattttctgtttatttcctcaaacactacacaatgccatacccatctaagggttggagacccatatttatagccctagaggctgcactaccacaccttctcacacacactacacaacaggattgtcctatagatgctaaagagactacagaggacaatcaaaagcgactgttgtcctctagatgctaaagggactacagaggacagtcaagctgtcctctagatgctaaaggactacagaggacagtcaaaagcgactgctgtcctctagatgctcaaggactacataggacagtcaaaagcgattgttgtcctctagatgctcaagacttattccatcattctccccctaagtcttgggcgtcgtcttgtgagaaagttgggccatcccggacctggagcaaagctcaacaaacttgatcttcccaaggggcttggtgagcaggtctgcaagctgatccttggtgttgatgtagcgcgccttgatgctcccttctgccaagcagtctcggatgaaatggtatctcagccggatgtgcttgctccgttcatggaacacggggttcttggccaatgccagagcggactggctgtccaccctgagttccaccgctccagtgtctctcccgaggagatcaccgagcagtcgagccagccagagcgcctgagtcgaagcagtggacgccgctatgtactcggcctcgcagctggacatggccaccacctgctgcttcaccgactgccagctaatgaggcacttgtcgaggaagaagaggatcccgcttgtgctcttgctagtgtcgatgtcaccggcgtggtcgctgtcgctgtacccgacaaggtgtgcctccccagggcacctcgggtagtagagaccgtggtcgagagtccccgcaacatagcggatgatcctcttcacagcctgctcatgctccgtcgtcggtcgctgcaagaaccgactaacgtagccgacggagtatgccaagtcaggccgtgtgtggacgaggtagcgaacgctccccacaagacgctggtactgtgtagcatccacctcctccgtcgtgctgtcgcgactcagcttcagcctctcctccaggaggagagctgggttgcagtcggtgagcccagccagctcaacaatgcgcttggcgtaggcggtctggcgaagtgtgatcccggagtctccctggtgcacctcaatccccaggtagaaggagagatgccccaggtcactcatttggaaagtggccttcatctcttccttgaacgctgccacctctacatccttggcgccggtgatcaccaagtcgtcgacgtagacacccaccagcagggcacttccctcatttgcccgacgatagatggctgcctcgtgcgggctggcgtgaaaccattcctttgagcgtggatccagctggcatttcacgcccatcgtgcctgtccaggccataaagac

SEQ ID NO: 510 - DNA, 3329 bp, Zea mays
  source: /note="Zea mays BAC clone full insert sequence contig bacm.pk155.l13.fis74"
ttaatgatggtggtaaaataaaggaacacgttcggtacgtgtccccttctcgctgggttcttattctgattatgctgattgcgatgttattcctatggaagcatgctctttgttattaggtcgaccttggcaatatgatactgatagtttacatcatggtcgttcaaatcattattctttcatgtttaaaggccagaaaataattatacatccaatgacccctgaccaaattttgaaagatgatcttactagggctgctaaaactgcacaacaagtcaaatcgacatcagccgcacctattaaatctgaaatcaagttgcactctcctgttttacttgctacacgtgctgattttgatgatctccatgaagctcatatgccctgttatgcacttgtatgctcgcgaatgcttgttccgcttgatgatgcaccgtctttggatataccccctgctgttgttaaccttttgcaggagtatgctgatgtttatcctacggacttaccaccgggtcttcctcccctccgtggcattgagcatcagatcgatctcatccccggcgcttctcttccgaaccgcgccccgtaccgtacaaatccagatgagacgaaggagatccagcgccaggtgcagacgctgcttgataagggttacattcgtgagtctcttagcccttgctcggttcctgttttactcgttccaaagaaagatgggtcatggcgtatgtgcgtagattgtcgtgctattaataacatcacagttcgttatcgatatcctattccacgccttgatgatatgctagatgagcttagtggtgccgttattttctctaaggttgatttgcgtagcggttaccatcagattagaatgaaactcggtgatgaatggaaaacggcttttaaaacgaaatttggtttatatgaatggttggttatgccatttggattgactaatgctcccagcacctttatgcgtttaatgaacgaagttctacgggccttcataggtttgtttgttgttgtttatttcgatgatatccttatttacagcaagtctatagaggagcatttagaacatttgcgtgctgtttttgacgctttgcgtgctgctcgcttgtttggtaacatggaaaagtgcacattttgcacgcaacgtgtctcgtttcttggttatgtggttactccgcagggcattgaggtggatagcagcaagattgctgccattcgggagtggcctacaccgacgacggtcacacaaattcggagctttcttggacttgccggtttctaccgcagatttgttcgtgattttagctccattgcagcgcctctacatgagcttacaaagaaagatgtgccgtttgcttggagtgattcgcaggaggtagcgttcagcactttgaaagataagttaacccaagctcccctattgcaattgcctgattttaataaagtgtttgagcttgaatgcgatgctagcggtattgggctaggtgctgttttgttacaagaaggaaaaccagttgcttattttagtgaaaaaataagcggtgctagtctgaaatattctacttatgataaggagctttacgctttagtgcgcactttgcatacatggcagcactatctttggcatcgtgagtttataatccattctgatcatgaggctttaaaacatattcgtacccaaacaaatctgaaccgtcgtcatgctaaatgggtagaattcattgagtcctttccttacattattaaacacaagaacgggaaggacaatgttattgctgatgctttgtctcgtcgctataccatgctgtcacagttagattttaaaatctttggtttggacactgtgaaggatcaatatgttgacgatgctgattttaaagatgctttcggccattgtattaatgggaaaccatggggcaaatttcacatacaggatgggttcctgtttcgcgctaacaagctgtgtgttccagctagctcggttcgtcttttgttgttacaggaagcgcatggaggcggtctcatggggcattttggcgtctacaagacacatgaggtgttggctgcccacttcttttggcctcggatgcgcgctgatgtggagcgcctttgtgcacgctgcactacttgtcagaaagctaagtcacggttgaacaaccatggtttgtatatgcctttgcctgtcccttcttctccttggcttgatatctctatggactttgttttgggcttgcctagaactaagaaggggagggatagtatttttgtggttgttgatagattctctaaaatggctcactttataccttgtcataaaactgatgatgctagcattgttgctgaattgttatttagagaaattattcgtttacatggtattccaaaaacaatagtctctgatcgcgatgctaagtttctaagccatttttggagatctctttggaataaattgggaactaaattgttgtttagcactacttgtcaccctcagattgatggacaaactgaggtagtaaatagaactttatctaccatgcttagggctgttttagacaagaatttgagacgttgggaggattgcttgcctcatgttgaatttgcttacaatcatgccacgcattcttctacaaagatgtgccctttccagattgtttatggttacattcctagggcacctattgatttgatttcacttaatgctgcgaacgccccacatgtagatgcttctgcacatgttgaacaaatgattaccatacatgaacaaacgaaacagaacattgctgctactaatgcaaaaaatcaggttgctggtagtaaaggaagaaaacatgttacttttgaacctggtgatatggtttggttgcatttgagaaaggatcgttttcctactttgcgccgttctaaattgatgcctcgtgctgctggtccttttaagatactaaccaagattaatgataatgcttataccctcgacctacctgcggattttggtgtttccactagttttaatgttgcagatttgaaaccgtatgcgggagaagatgaggagttgccgtcgaggacgacttcagttcaagaaggggaggatgatgcggacatcaacaccaacacgagcacatctacaccagcagcaccttctctagcccaggcgccaccccttccacctgggccagtgactcgggcccgtgcaagagaattgaactacatcatgttgttaaagaacgaaggcccggaagaatagacgaccagcccaattgcggcccataatggacgacctagggttggccgcccctaggggctgcgtcccctctctatttattcag

SEQ ID NO: 511 - DNA, 3341 bp, Zea mays
  VARIATION (3110)..(3110): /replace="c" or "g" or "t"
  misc_feature (3110): /note="Nucleotide given in the sequence has no preference with respect to those in the annotation for said position"
  source: /note="Zea mays BAC clone full insert sequence contig bacm.pk155.l13.fis75"
cagcgacacccgtttttggaatgagtgacgtgcggcaacgaaattgcgcgaaaccaccccaaacattagttttgtacctaaagtagtggattgggcatgttcgttgtgaaaaacaaagaaatggttccggtggcaaaaactcgttcttgtatgcaccccgacacccgttttcggaatgggtgacgtgcggcaacgaaattgcgcgaaaccactccaaacatgtgttttggacctaaagtagtggattgtgagtgttcgttgcgaaaaacgaagaaatggttccggtggcaaaaactcgttcttgtatgcacccgttttcggaatgggtgacgtgcggcaacgaaattgcgcgaaaccaccccaaacatgtgttttggacctaaagtagtggattgggcatgtttgttgcgaaaaacgaagaaatggttccggtggcaaaaactcttgctttgtatgcaacccgacacccgttttcggaatgagtgacgtgcggcaacgaaattgcgcgaaaccaccccaaacatgtgttttggacttaaagtagtggattgggcatgttcgttgcgaaaaacgaagaaatggttccggtggcaaaaacttgtgctttgtatgcaccgcgacacccgttttcggaatgggtgacgtgcgacaacgaaattgcgcgaaaccaccccaaacatgagttttagacctaaagtagtggattgagaatgttcgttgcgaaaaacgaagaaatggttccggtggcaaaaactcgtgctttgtatgcaccgcgacacccgttttcggaatgggtgacgtgcgacaacgaaattgcgcgaaaccaccccaaacatgagttttggacctaaattactggattgggcatattcgttgcgaaaaacgaagaaatggttccggtggcaaaaactcgtgctttgtatgcaccctgacaccctttttcggaaagggtgacgtgcggcaacgaaattgcgcgaaaccgacatgagttttggacctaaagtagtggattgggcatgttcgttgcgaaaaacgaagaaatggttctggtggcaaaaactcgtgcttgtatgcaccccgacacccgttttcggaatgggtgacgtgcgacaacgaaattgcgcgaaaccaccccaaacatgtgttttggacctaaagtagtggattgggaatgttcgttgcgaaaaacgaagaaatggttccggtggcaaaaactcgtgcttgtatgcaacccgacacccgttttcgaaataggtgacgtgcggcaacgaaattgcgtgaaaccaccccaaacatgagttttggacctaaagtagtggattgggcatgttcgttgcgaaaacgaagaaatggttccggtggcaaaaactcgtgcttgtatgcaccccgacacccattttcggaatgggtgacgtgcggcaacgaaattgcacgaaaccaccccaaacatgtgttttggacctaaagtagtggattgggcatattcgttgcaaaaaacgaagaaatggttccggttgcaaaaactcgtgctttgtatgcactgcgaacccattttcagaatgagtgacgtgcggcaacgaaattgcgcgaaaccaccccaaacatgagttttggacctaaagaagcggattgagcatgttcattgcgaaaaacgaagaagtggttccggtggcaaaaactcgtgcttgtatgcacccccgacacccgttttcggaatgggtgacgtgcggcaactaaattgcgtgaaaccaccccaaacatgtgttttggacctaaagtagtggattcaggatgttcgttgcgaacaacgaagaaattgatccggtggcaaaaactcgtgctttgtatgcaccccgacacccattttcggaatgagtgacgtgcggcaacgaaattgcgcgaaaccaccccaaacatgagttttggacctaaagtagtggattgggcatgttcgttgcgaaaaacgaagaaatgattccggtggcaaaaactcgtgctttgtatgcaccccgacacccgttttcgaaatgagtgacgtgcggcaacgaaattgcgcgaaaccaccccaaacatgagttttggacctaaagtagtggattgggcatgttcgttgcgaaaaacgaagaaatggttccggtggcaaaaactcatgctttgaatgcaatccaacacccattttcggaatgggtgacgtgcggcaacgaaattgcgcgaaaccaccccaaacatgagttttggacctaaattagtggattgggcatgttcgttgcgaaaaacgaagaaatggttccggtggcaaaaactcgcgctttgtatgcaccgcgacacctgctttcagaatgggtgacgtgcggcaacgaaattgcgcgaaaccaccccaaacatgagttttggacctaaattactggattgggcatgtttgttgcgaaaaaagaagaaatggttccggtggcaaaaactcgtgctttgtagcaccccgacacccgttttcggaatgggtgatgtgcggcaacgaaattgcgcgaaaccaccccaaacatgagttttggacctaaagtagtggattgggcatgttcattgcgaaaaacgaagaaatggttctggtggcaaaaactcgtgcttgtatgcacctcgatacccgttttcggaatggattacgtgcggcaacaaaattgcgcgaaaccaccccaaacatgagttttggacctaaagtagtggattggacatgttcattgcgaaaaacgaagaaatggttccggtggcaaaaactcatgctttttatgcaccccgacacccgttttcgtaatgggtgacgtgcggcaacgaaattgcgcgaaaccaccccaaacatgagttttggacctaaattagtggattgggcatgttcgttgcgaaaaacgaagaaatggttccggtggcaaaaactcatgctttgtatgcaccccgatacccgttttcggaatgggtgacgtgcggcaacaaaattgcgcgaaaccaccccaaacatgtgttttggacctaaagtagtggattgggcatgttcgttgtgaaaaacgaggaaatggtttcggtggtaaaaactcgtgcttgtatccaccccgacacccgtattcggaatgagtgacgtgcggcaacgaaattgcgcgaaaccaccccaaacattagttttggacctaaagtagtggattgggcatgttcgttgtgaaaaacgaagaaatggttccggtggaaaaaactcgtgcttgtatgcaccccgacacccgttttcgaaatgggtgacatgcggcaacgaaattgcgtgaaaccaccccaaacatgtgttttggacctaaagtagtgga

SEQ ID NO: 512 - DNA, 2719 bp, Zea mays
  source: /note="Zea mays BAC clone full insert sequence contig bacm.pk155.l13.fis76"
tcgtgcttgtatgcaccccgacacccgttttcggaataggtgacgtgcggcaacgaaattgcgcgaaaccaccccaaacatgagttttggacctaaagtagtggattgggcatgttcgttgcgaaaacaaagaaatggttccggtggcaaaaactcgtgcttgtatgcaccccaacacccattttcggaatgggtgacgtgcggcaacgaaattgcaagaaaccaccccaaacatgagttttggacctaaagtagttgattgggcatgttcgttgcgaaaaacgaagaaattgatccggtggcaaaaactcgtgctttctatgcaacccgacacccgtttttggaatgagtgacgtgcggcaacgaaattgcgcgaaaacaccccaaacatgagttttggacctaaagaagcggattgagcatgttcattgcgaaaaacgaagaagtggttccggtggcaaaaactcgtgcttgtatgcacccccgacacccgtttttggaatgggtgacgtgcggcaactaaattgcgtgaaaccaccccaaacatgtgttttggacctaaagtagtggattcagcatgttcgttgcgaaaaacgaagaaattgatccggtggcaaaaactcgtgctttgtatgcaccccgacacccattttcggaatgagtgacgtgcggcaacgaaattgcgcgaaaccaccccaaacatgagttttggacctaaattagtggattgggcatgttcgttgcgaaaaacaaagaaatgattctggtggcaaaaactcgtgctttgtatgcaccccgacacccattttcggaatgagtgacgtgcggcaacgaaattgcgcgaaaccaccccaaacatgagttttggacctaaagtagtggattgggcatgttcgttgcgaaaaacgaagaaatggttccggtggcaaaaactcgtgcttgtatgcatcccgacacccgttttcggaatgggtgacgtgcagcaacaaaattgcgcgaaaccaccccaaacaggtgttttggacctaaagtagtggattgggcatgttcgttgcgaaaaacaaagaaatggttccggtggcaaaaactcctgctttgtatgcactgcgacacccgttttcggaatgagtgacgtatggcaacgaaattgcgcgaaaccacccgaaacatgagttttggacctaaagtagtggattgggcatgttcgttccgaaaaacgaagaaatggttccggtggcaaaaactcgtgctttgtatgcaccccgacacccgttttcggaatgggtgacgtgcggcaacgaaattgcgcgaaaccaccccaaacatgtgttttggacctaaagtagtggattgagaatgttcgttgcgaaaaatgaagaaatggttccggtggcaaaaactcgtgcttgtatccaccccgacacccgttttcggaatgagtgacgtgcgacaacgaaattgcgcgaaaccaccctaaacattagttctggacctaaagtagtggattgggcatgttcgttgcgaaaacgaagaaatggttccggtggcaaaaactcgtgcttgtatgcaccccgacacccattttcgaaatgggtgacgtgcggcaacgaaattgcgtgaaaccaccccaaacatgtgttttggacctaaagtagtggattgggcatgttcgttgcgaaaaacgaagaaatggttctggtggcaaaaactcgtgctttctatgcacagcgacacccgttttcggaatgagtgacgtgcggcaacgaaattgcgcgaaaccatcccaaacattagttttgtacctaaagtagtggattgggcatgttcgttgtgaaaaacgaaaaaatggttccggtggcaaaaactcgtgcttgtatgcaccccgacacccgttttcggaataggtgacgtgcgacaacgaaattgcgcgaaaccaccccaaacatgagttttggacctaaagtattggattgggcatgttcgttgcgaaaaacgaagaaatggttctggtggcaaaaactcgtcctttgtatgcaccccgacacccgttttcggaatgggtgacatgctgcaatgaaattgcgcgaaaccaccccaaacatgtgttttgaacctaaagtagaggattgggcatgttcgttgcgaaaaacgaagaaatggtttcggtggcaaaaactcgtgcttgtatgcaccccgacatccgtttttggaatgggtgacgtgtggcaacgaaattgcgcgaaaccaccccaaacattagttttggacctaaagtagtggattgggcatgttcgttgcgaaaaacgaagaaatggttccggtggcaaaaactcgtgctttgtatgcacagcgacacccgttttcggaatgggtgacgtgggacaacgaaattgcgcgaaaccaccccaaacatgtgttttggacctaaagtagtggattgggaatgttcgttgcgaaaaacgaaaaaatggtcccggtggcaaaaactcgtgcttgtatgcaccccgacacccgttttcggaataggtgacgtgcgacaacgaaattacgcgaaaccaccccaaacatgagttttggatctaaagtattggattgggcatgttcgttgcgaaaaacgaagaaatggttctggtggcaaaaactcgtgctttgtatgcaccccgacacccgttttcggaatgggtgacatgcggcaatgaaattgcgcgaaaccactcca

SEQ ID NO: 513 - DNA, 2764 bp, Zea mays
  source: /note="Zea mays BAC clone full insert sequence contig bacm.pk155.l13.fis77"
cacttcttttggcctcggatgcgcgctgatgttgagcgccttgttgcacgctacactacttgtcagaaagctaagtcacggttgaacaaccatggtttgtatatgcctttgtctgtcccttcttctccttggcttgatatttctatggactttgttttgggcttgcctagaactaagaaggggagggatagtatttttgtggttgttgatagattctctaaaatggctcactttataccttgtcataaaactgatgatgctagcattgttgctgaattgttctttagagaaattattcgtttacatggtattccaaaaacaatagtctctgatcgcgatgctaagtttctaagccatttttggagatctctttggaataaattggaaactaaattggaataaatctgcgctgtcttcgtgtattcagaactccaccctcgagtaatagattagattgctcgcatctttttcttgttcgttcttcgattgcgcacaggaaacgatcttcgtgatcaggccgatctcgcatcagcaaggtcggtaaccacaaggagttggttcagcgattgcattggcgcctcgggcttgctcgtcgtagtcggatcgcaagggtcgtcttccgccaaatcggaattatctcctctcgccgaaagatcgggcacctcagctacatcaacttactcctggcaactctctaggatcatatatcgtccccacagaccaacacgagtcttttatgcggactttgtcctcactcatgtgtcacccaagaaaacttcccggtcggtcacccatcctaaattgctccaagccaagcacgcttaacttggaggttctttcgagataggcttccgaaaaagaagatgcaccttgttgatatgattactctattaattctattaagcattgggccaggatatcccatctcaggggctaggatatcacaacccagagtaaaatggtcgttctaaggactatagacctctgtccctgccttgactttgatatcccttcaaaagttggtcataccgaccaagactatgttctactgtatattataccttgctgaaaattgtgttttattctaatccttcatttatttatggttcattacttgctggtcatattaattctgttctcactcttttgcttgcggtgtcttttgtagatggctcgtcttagacacactacacgaaagtccgtcatccccttcttaccctcccgccttgctgagcgtccgcttcgccgtcccgtggccggagagtccagtcacttggagaggctgcaccaccgcctgcatgaggagcaggaacgtcgacgataggagcagcagggctcttctttctcgctgcaccaggagatagagtccgtgaggagctgctcccctgtgcttcctctggaggcgccccctgcaccactactgggcgccccagcttctggagtagctgctggaggagacccagacgacggaggtggcgacgacagctcgagccacgacaccgacttctctgctgaccaggagccgaaaggatgggttgctcgacccatcactcgcgacgttgctcgcgggtgtcatttccacgatgcgctcgacaccctgctacgtcgggcacttaaccggcgtacctggtccatcgagtatcgctgtgtggtctaccaacatagtcgcggggtctacccggaccgctgggaggcgacctgcttggtgcgccgtccggagaacagtctccaaggtgctgaggtctgctcagagcactattctatctctgagcgggactcagctgaggcggccatgcaagatgctgcacggcgtgcgctttcgcactactgctcggttcttggtggggtagctgacggtctcaacctgaagtactacccccgccgtccatctggcagcacaggaggcgtgattgtttcacctgtcggtgaggacaatcctaggttgagcagcacagtcaacctagccgtcgtgctaaacacggagctggaccatgccctagacgagctgagtagggctcgtgctgagatcgccctgctgcgggctgagcgcgcggaacgtcgtcacctggatgatgtttcccccgctcccgtcgggactcagcacccgtaccgctcacctcggcgtggacgccagtcttatggcaatcccgactgcaagaccaagataaatctagaaccatagatcgttagagttggatcttgtaattaatacaaaatatatacgtagaagttacagtcttagtgttagtcttgcccttagttagtcttagttagacaggatagtttgctatatcctgtgcatttatgtttgtcatgatgaactatgtttggtttggatctttgtaatgactgtcaccagagtgtgggtatcccctgcattttggtttacctattatgttaatggagttagttatatagttgggaaaccttttattccactttcctctttatctgagaagctgtgtggtctgtgttggagatcagtgaggatgctcatctgttcagtgctgttgaaggattctatactcttttcttatgctgcaagattggccagatcagttctgatgtgtggttgcattctgcagatgtcagagaataggcgcagaggaggaaggcgtgctcagcaggagcgagccgctcagcaggatgaggtgccccagcaacagcacctgccacccccgcccccgatgtcgatcgagcagatgtttctgatgcagactcaggcagttcaagccatcggtcagactctggccgccattcagca

SEQ ID NO: 514 - DNA, 3534 bp, Zea mays
  source: /note="Zea mays BAC clone full insert sequence contig bacm.pk155.l13.fis78"
tcccgttcttgtgtttaataatgtaaggaaaggactcaatgaattcgacccatttagcatgacgacggttcagatttgtttgggtacaaatatgttttaaagcctcatgatcagaatgaattatgaactcatgatgccaaagatagtgctgccaggtatgcaaagtgcgcactaaagcgtaaagctccttatcataagtagaatatttcagactagcaccgcttaatttttcactaaaataagcaactggttttccttcttgtaacaaaacagcacctagcccaataccgctagcatcgcattcaagctcaaaaactttattaaaatcagacaattgcaagaggggagcttgggttaacttatctttcaaagtgctgaacgctacctcctgcgaatcaatccaagcaaacggtacatctttctttgtaagctcatgtagaggcactgcaatggagctaaaatcacgaacaaatctgcggtagaaaccagcaagtccaagaaagctccgaatttgtgtgaccgtcgtcggtgtaggccactcccgaatggcagcaatcttgctgctatccacctcaatgccctgcggagtaaccacataaccaagaaacgagacgcgttgcgtgcaaaatgtgcacttttccatgttaccaaacaagcgagcagcacgcaaagcatcaaaaacagcacgcaaatgttctaaatgctcccctatagacttgctgtaaataaggatatcatcgaaataaacaacaacaaacaaacctatgtaggcccgtagaacttcgttcattaaacgcataaaggtgctgggagcattagtcaatccaaatggcataaccaaccattcatataaaccaaatttcgttttaaaagccgttttccattcatcaccgagtttcattctaatctgatggtaaccgctacgcaaatcaaccttagagaaaataacggcaccactaagctcatcaaacatatcatcaaggcgtggaataggatatcaataacgaactgtgatgttattaatagcacgacaatctacgcacatacgccatgacccatctttctttggaacgagtaaaacaggaaccgagcaagggctaagagactcacgaatgtaacctttatcaagcagcgtctgcacctggcgcttctcatgtttagggtggtttcgcgcaatttcgttgccgcacgtcacccattccgaaaacgggtgacgggttgcatacaaagcacgagtttttgccaccggatcaatttcttcgtttttcacaacgaacatgcccaatccactactttaggtccaaaactcatgtttggggtggtttcgcgcaatttcgttgccgcacgtcacacattccgaaaatgggtattgggttgcattcaaagcacgagtttttgccaccggaaccatttcttcattcttcggaatgaacatgcccaatccaatactttaggtccaaaactcatgtttggggtggtttcgcgcaatttcgttgctgcacgtcactcattccgaaaacgggtgtcagggtgcatacaaagcacgagtttttgccaccggaatcatttcttcgtttttcgcaacgaacatgcccaatccactactttaagtccaaaacacatgtttggggtggtttcgcgaaatttcgttgccgcacgtcacccattccgaaaacgggtgcatacaagcacgagtttttgccaccagaaccattttttcgtttttcgcaacgaacattcccaatccactactttaggtccaaaactcatgtttgggggtggtttcgcgcaatttgattgccgcacgtcacccattccaaaaacgggtgtcggggtgcatacaagcacgagtttttgccaccggaaccattttttcgtttttcgcaacgaacattcccaatccactactttaggtccaaaacacatgtttggggtggtttcgcgcaatttcgttgtcccacgtcacccattccgaaaacgggtgtcggggtgcatacaagcacgagtttttgccaccggaaccatttcttcgtttttcgcaacgaacatgcccaatcctctactttaggtccaaaacacatgtttggggtggtttcacgcaatttcattgccgcatgtcacccattccgaaaacgggtgtcggggtgcatacaaagcacgagtttttgccaccgaaaccatttcttcgtttttcgcaacgaacatgcccaatccaatactttaggtccaaaactcatgtttggggtggtttcgcgcaatttcgttgtcgcacgtcacctattccgaaaacgggtgtcggggtgcatacaagcacgagtttttgccaccggaaccattttttcgtttttcgcaacgaacattcccaatccactactttaggtccaaaacacatgtttggggtggtttcgcgcaatttcattgtcccacgtcacccattccgaaaacgggtgtcggggtgcatacaagcatgagtttttgccactggaaccatttttcgtttttcgcaacgaacattcccaatccactactttaggttcaaaacacatgtttggggtggtttcgcgcaatttcgttgtcccacgtcacccattccgaaaacgggtgtcggggtgcatacaagcacgagtttttgccaccggaaccatttcttcgtttttcgcaacgaacatgcccaatcctctactttaggtccaaaagacatgtttggggtggtttcgcgcaatttcattgccgcatgtcatccattccgaaaacgggtgttggggtgcatacaaagcacgagtttttgccaccggaaccatttcttcgtttttcgcaacgaacatgcccaatccaatactttaggtccaaaactcatgtttggggtggtttcgcgcaatttcgttgtcgcacgtcacctattccgaaaacgggtgtcggggtgcatacaagcacgagtttttgcccacggaaccatttttttcgttttttcgcaacgaacattcccatccactactttaggtccaaaaacacatgtttgggggtggttcgcgcatttcattggtcccacgttcaccaatttccgaaaacggggtgtcgggggttgcatacaaagccacgagttttttgccaacggaaaccatttttttcctttttttcgcaacgaaaaatttcccaaatcccctaattttatggcccaaaaaaccatttttttgggggggggttccccgcaaattttcgttggcccccccgtttcccccatttccgaaaaaaggggggtgggggggggccaaacaaaaacaccagagtttttttgccccaccggaaaacatttttttttttttttttttcgcaaagaagaaattgcccaatctccttttttttttgggccccaaaaaaccctgttgggggggggggttccccgaaattttttttgtggccggggttcccccaaataaaaaaaggggggtggtgggggggaacaaaaaaaggattttttttttccccccaaaaaatattttttttgtttttttttaaaaagaaaaaaaaaaaaaa

SEQ ID NO: 515 - DNA, 4135 bp, Zea mays
  VARIATION (1596)..(1596): /replace="c" or "g" or "t"
  misc_feature (1596): /note="Nucleotide given in the sequence has no preference with respect to those in the annotation for said position"
  source: /note="Zea mays BAC clone full insert sequence contig bacm.pk155.l13.fis79"
cccacaactccacatatttctacgacgagcaggtttctgtttctccacgcaatcgctcatccaatctttcaccggttccacctgttgattgcagttcaccactgtggcttggtaagcacggataagaacttgataacagcactagtgtgagcgccttgtgagcagtacacccctgtttttgtcgttggtttttctccttttggtgtttgcggcaacgaaattgcgcgaaaccaccccaaacatgagttttggacctaaagtagtggattaggcatgttcgttgcgaaaaacgaagaaattgatccggtgacaaaaacttgtgctttgtatgcacgctcgacacccgttttcggaatgggtgacgtgcggcaatgaaattgcgcgaaaccaccccaaacatgagttttggacctaaagtagtggattgggcatgttcgttgcgaaaaacgaagaaatggttctggtggcaaaaactcgtgcttgtatgcaccccgacacccgttatcggaatgggtgacgtgtggcaacgaaattgcgcgaaaccaccccaaacatgagttttggacttaaagtagttgattgggcatgttcgttgcgaaaaacgaagaaatggttcctgatgcggacatcaacaccaacacgagcacatctacacccgcagcaccttctccagcccaggcgccaccccttccacctgggccagtgactcgggcccgtgcaagagaattgaactacatcatgttgttaaagaacgaaggcccggaagaatagacgaccagcccaattgcggcccataatggacgacctagggtttgcccgcccctaggggctgcgccccctctctatttattcaggagctgcgcctcctttatttcctgagttttgttttacgttagccttagctactctcgaacacgcgcaaatctgcgctgtcttcgtgtattcagaactccaccctcgagtaatagattagattgctcgcatctttttcttgttcgttctcgatgcgcacaggaaacgatcttcgtgatcaggccgatctcgcatcagcaaggtcggtaaccacagggagttggttcagcgattgcattggcgcttcgggcttgctcgtcgtagtcagatcgcaagggtcatcttccgccaaatcggaattatctctactcgccgaaagatcgggcacctcagctacatcatcacctattctgaaaacgggtgtcgggtgcatacaagcacgagtttttgtcaccggaaccatttcttcgtttttcgcaacgaacatgcccaatccactactttaggtctaaaactcatgtttggggtggtttcgcgcaatttcgttgtcgcacgtcacccattccgaaaacgggtgtcggggtgcatacaagcacgaatttttggccaccgaaacaattttttcttttttcgaaccaaaatgccccaacccactactttagggtccaaaactcatgtttagggtgggttccgcgcaatttcgttgtcgcacgtcacccattccgaaaacgggtgtcgggttgtatacaaggcacgagtttttgcaaccggatcactttcttcgtttttcgcaacgaacatgcaccaatccactactttaggtccaaaacacatgtttggggtggtttcgcgcaatttcgttgccgcacgtcacccattccgaaaacgggtgcatacaagcacgagtttttgccaccggaaccatttcttcgtttttcgcaacgaacatgcccaatccactactttaagtccataactcatgtttggggtggtttcgcgcaatttcgttgccacacgtcacccattccaaaaacgggtgtcggggtgcgtacaaagcatgagttttggcaccggaaccatttcttcgttcttcgcaacgaacatgcccaatccactactttaggtccaaaactaatgtttgtggtggtttcgcgcaatttcgtagccgcacgtcactcattccgaaaacgggtgtcgcggtgcatacaaaggacgagtttttgccaccggaaccatttcttcgtttttcgcaacgaacatgcccaatccactaatttaggtccaaaactcatgtttggggtggtttcgcgcaatttcgttgccgcacgtcactcattccgaaaatgggtgttgggttgcattcaatgcacgagtttttgccaccggaaccatttcttcgtttttcggaatgaacatgcccaatccactactttaggtccaaaacacatgttttgggtggtttcgtgcaatttcgttgccgcacgtaacccattccaaaaacaggtgtcggggtgcatacaagcacgagtttttgccaccggaatcatttcttcgtttttcgcaaggaacatgcccaatccactactttaggtccaaaactcatgttgggggtggtttcgcgcaatttcgttgccgcacgtcactgtcacacccggttttagaaggcaaaccgaatgcgaaccatgtacgtgccaggatcagcaattcacgtacacagcagttacataacatggacatcatcacacagtgctcaaataatattaaaagggaaatagtcgattatatcatatgtctgtgacatccacatagtctttataataaatcaaagtgcggaaaagaaacgtagataaacgcggccttcacaggcagccgactggggggttgccgctaacccacgcctagaactcgtcgtagtcttggaactcctggaagtctccttccgcagcttcatcttctcctgagcagtggttgcaatgctgacaacctggggatgggggggggggtttggtgtgtagatcaagggtgagtccacatcaacatactcagcaagtatcctgtttggctgtagaaaactaagcttatgtggggataagtcaagcagtttccttttaagtgggccaaatatttatttacctatagaaaagcagggtttagcattaccaaagttattagcccaatgtacccttccaaaacggaaagaataccactacccagcaccatagtcataaccaaaaccatcaatctcattgccacctgtaaaccaaaatgtctctgatcaagtaccactaatcactggagctcccttggccgctcataaccgcgagcacggctgatatatcagttttcaaacactctgcagaggttgtgcactttacccacaagtcgtgattccctttgcgccggagagagctactccccattgaccactgcctaggtggtccagcagggcatcactacgtagcctttacaaagattccccggggctatagccgcccgttaggtttcctaaatgcaccgcactcctccccaagagggcgaacccaaacttggcagagcgagccgcatacaccgagccccattgacggcatgacgtctaagcgaactacaccccggatcctctaattattcagctaagggcaccccattccaccctcatggttgcactgttttcctgggcggtcatccatagaacaggtccttacggagaggcactcgagaaaccgctcgagcccccttaaaggccacaagtagaacatcataataagagaagggaaaacagcgtatcatagataatctcatcatgttcattgattagagtttgagtaatagcataaagctaaacaataataatccaacccaaataggtaaacgaggacaaggataacaaagctagtcaatccttaggcataaatgtgtaatgcgggaggtgaattaaagaatgaataggacagagataggtcaagggacacttgcctccaccaaccgactgctgctcaggggcttctcctgcgagtccttcgggctcctcgaccgaatcgttctctatgcgattgcaagcatacatacatccatccattcaaattaggaaacaaacagtacaccatacaagagaacaaataaaggaaatatgcatagaatatcacatacgataatgaatttaccatggttagaaagagacggggaaaggtcttacgagggttaaagcttatgctcgagacgcgttacgggtaggcaaataactagacgttacgtgctctagttccaattggttctaacaaaaggattagctacatgcactaatgtaaacgtgaccctttttagtagattaacattgaatgagata

SEQ ID NO: 516 - DNA, 3546 bp, Zea mays
  source: /note="Zea mays BAC clone full insert sequence contig bacm.pk155.l13.fis80"
tccactactttaggtccaaaacacatgtttggggtggtttcgcgcaatttcattgtcccacgtcactcattccgaaaacgggtgtcggggtgcatacaagcacgagtttttgccaccggaaccattttttcgtttttcgcaacgaacattcccaatccactactttaggtccaaaacacatgtttggggtggtttcgcgcaatttcgttgtcccacgtcacccattccgaaaacgggtgtcggggtgcatacaagcacgagtttttgccaccggaaccattttttcgtttttcgcaacgaacattcccaatccactactttaggtccaaaacacatgtttggggtggtttcgcgcaatttcgttgtcccacgtcacccattccgaaaacgggtgtcggggtgcatacaagcacgagtttttgccaccggaaccatttcttcgtttttcgcaacgaacatgcccaatccactactttaggtccaaaactcatgcttggggtggtttcacgcaatttcgttgccgcacgtcacccattccgaaaacgggtgtcggggtgcattcaagcacgagtttttgccaccagaaccatttttttctttttcgcaacgaacatgcccaatccactagtttaggtccaaaactcatgtcgatttcgcgcaatttcgttgccgcacgtcaccctttccgaaaacgggtgtcagggtgcatacaaagcacgagtttttgccaccggaaccatttcttcgtttttcgcaacgaacatgcccaatccagtaatttaggtccaaaactcatgtttggagtggtttcgcgcaatttcgttgccgcatgtcacccattccgaaaacgggtgtcggggtgcatacaaagcacgagtttttgccaccggaaccatttcttcgtttttcgcaacgaacatgcccaatcctctactttaggtccaaaacacatgtttggggtggtttcgcgcaatttcattgccgcatgtcacccattccgaaaacgggtgtcggggtgcatacaaagcacgagtttttgccaccgaaaccatttcttcgtttttcgcaacgaacatgcccaatccaatactttaggtccaaaactcatgtttggggtggtttcgtgcaatttcgttgtcgcacgtcacctattccgaaaacgggtgtcggggtgcatacaagcacgagtttttgccaccggaaccattttttcgtttttcgcaacgaacattcccaatccactactttaggtccaaaacacatgtttggggtggtttcgcgcaatttcattgtcccacgtcacccattccgaaaacgggtgtcggggtgcatacaagcacgagtttttgccaccggaaccattttttcgtttttcgcaacgaacattcccaatccactactttaggtccaaaacacatgtttggggtggtttcgcgcaatttcgttgtcccacgtcacccattccgaaaacgggtgtcggggtgcatacaagcacgagtttttgccaccggaaccattttttcgtttttcgcaacgaacatgcccaatcctctactttagtcccaaaacacatgtttggtgtggtttcgcgcaatttcattgccgcatgtcacccatccgaaaacgggtgtcggggtgcatacaaagcacgagtttttgccaccgaaaccatttcttcgtttttcgcaacgaacatgcccaatccaatactttaggtccaaaactcatgtttggggtggtttcgcgcaatttcgttgtcgcacgtcacctattccgaaaacgggtgtcggggtgcatacaagcacgagtttttgccaccggaaccattttttcgtttttcgcaacgaacattcccaatccactactttaggtccaaaacacatgtttggggtggtttcgcgcaatttcattgtcccacgtcacccattccgaaaacgggtgtcggggtgcatacaagcacgagtttttgccaccggaaccattttttcgtttttcgcaacgaacattcccaatccactactttaggtcaaaacacatgtttggggggggtttcgcgcaatttcgttgtcccacgtcacccattccgaaacgggtgtcggggtgcatacaagcacgagtttttgccaccggaaccatttcttcgtttttcgcaacgaacattcccaatgcactactttaggtccaaaactcatgtttggggtggtttcacgcaattttgttgccgcacgtcacccattacgaaaacgggtgtcggggtgcatacaaagcatgagtttttgccagcggaaccatttttcgtttttcgcaacgaacatgcccaatccactactttaggtccaaaacacatgtttggggtggtttcgcgcaatttcgttgccgcacgtcacccattccgaaaacaggtgtcggggtgcatacaagcacgagtttttgccaccggaaccatttcttcgttttttgcaatgaacattccccatccactactttatgtccaaaacacatgtttggggtggtttcgcgcaattttgttgccgcacgtcgcccattcggaaaacgggtgtcggggtgcatacaaagacgagtttttgccaccggaaccatttcttcgtttttcgcaacggacatgcccaatccactactttatgtccaaaacacatgtttcgggtgatttcgcgcaatttcgttgccgcgcgtcacccattccgaaaacgggtgtcggggtgcatacaagcacgagtttttgccaccggaaccatttcttcgttttttgcaacgaacattctcaatccactactttaggtccaaaactcatgtttggcgtggtttcgcgcaatttcgttgtcgcatgtaacccaatccaaaaacgggtgtcggggtgcatacaaagcacgagtttttgccacaggatcaatttcttcatttttcacaacgaacatgaccaatccactactttaggtccaaaacacatgtttggggtgttttcgcgcaatttcgttgccgcacgtcacccattccgaaaacgggtgttggggtgcatacaagcacaagtttttgccaccgaaaccatttcttcgtttttcgcaacgaaaaagcccaatccactactttaggtccaaaactcatgtttggggtggtttcgcgcaatttcgttgccacatgccaaaaacgggtgtcggggtgcgtacaaagcatgagttttggcaccggaaccatttcttcgttttttgcaacgaacatgcccaatccactactttaggtctaaaactcatgtttggggtggtttcgcgcaatttcattgccgcacgtcactcattctgaaaacgggtgtcggggtgcatacaaagcacgagttttcgccaccggaaccatttcttcgtttttcgcaacgaacatgcccaatccacaactttaggtccaaaactcatgtttggggtggtttcgcgcaatttcgcacgtcactcattccgaaaatgggtgttgggttgcattcaaagcacgagtttttgccaccgtaaccatttcttcgtttttcgcaacgaacatgcc

SEQ ID NO: 517 - DNA, 4125 bp, Zea mays
  source: /note="Zea mays BAC clone full insert sequence contig bacm.pk155.l13.fis81"
ttcagaaggaacagagggcgatcgatcaagttgtttagcagttatagcagctcgggcaagatcatctttaacaatttgttcaggtgtcattggatgtataattattttctgacccttaaaaatgaaagaataatgattcgaacgaccatgatgcaagctatcggtatcatattgccaaggtcgaccaagtaacaaagagcatgcttccatgggaataacatcacaatcaacaaaatcagaataagcacccatggagaaaggaactcgcacggaacgcgtgatttttattttaccaccatcattaagccattgaatgtgatatgggtttggatgcttacgagtgggtaacgacaacttttcgaccagcatggtactcgccaaattgttgcaactgccgctgtcgataatgatgcgaattgaccgctcctgcacaacaccctttgtatggaacagagtgtgtcgctgattcttctcgggcaaagcgacctgtgtactgagaacacgctgcacaacaagactttcatacctatcagcgtcgctcgggttgacatgtacctccgccttagctgcatggtcagtggcaagtagtgcatgttcaatttcttcagaatcactagcggaagagtactcaccatcgtcacgaatgagtaaagtgcgctgacactgaatatcccgtgtacgacctatgggtggggcagtgctggctggtttggtcgtcttctcgcgtggagtagtggtggacgtggatggcgcagggggaactggtgctgaggtggatgtcgagcttcgtcctgcaaaagggttagaatatggcttcgagcggcgtccctgcacttcacgttcagctttgcaagcatattcaaataaagtagtcatatcataatattccttataatcaagtatatcttggatttcgcggtttaaaccaccacgaaaacgtgccatagcagcgtcgttgtcctccaatatcccacaacgaatcatacctttctgtaactcctggaaatagtcctcaacagattgagaaccttgctgaaaacgctgcattttattaagcaaatcacgagcataatacgaaggcacaaatcgatgtcgcatcgcagctttcaactgatcccaagtggttggaatggtagtgggatgttttattttaaactcacgccaccaaattaaagcaaaatcagtaaattcactaatagcagctttaacctgagaatgtgcagcaatatcatggcatgaaaatttttgttcaacctctaactcccaatcaagatatgcagcaggatcatatttgccattaaaaggtggaattttaaatttaatcttagaaaataagtcattagggggatgacgaaccacacggcgtgcacgaccacggcgatctccatcgtcccactcagtgtcaccgccgtagtcctgctccatctttgtggtcaacgcatcaaggcgtgccaggatggtgtcgagtgtggtgcgagtcgccatttgagcaaggtcaagctggttgaaacgctcggtcatcgaagtgaccgttgaatcaagccgttcatgcatcgtcctaatgtcatcagcaagtccatcaacttgtccctttacttccagcaactgggcatccaccgtgtcatgtgctcctgccatagttagagcaaacaccaaaacaccaaaaaaacgacaaaaacaggggtgtactgctcacaaggcgctcacactagtgctgttatcaaattcttatccgttcttaccaagccacagtggtgaactgcaaccaacaggtggaaccggtgaaagattggatgagcgattgcctggagaaacagaaacctactcgtcgtagaaatatgtggagttctgggtaggctgcactcaagtcaaggattagcacgaccaaacaataatgcaaagttgaattatagtgcaaaacacgaaactatattgctggccacaagtgcaaaggacggatggaactagcagaatggcagtaccgtaaatattgtactagcgaggccactagtaggaatcacaagtgattttgtttttcttttttgtatgatttttttgatatttttctcagcacaagaagcaacaaaataggagctacacgaagtttcacctcaaacagagttcaaatgtggtctacagaaaatcaggaagttctctgaaaagcgtgcgagaactttgacggattttttctttattttcctgaatttttttgacaattttgtcgaacccaaacagaccaaaggtcagtttggccggcctcagaatggtgtcaactagctcctgtaaaaatttcagattttttggacacccgagcgaaaagttatgcccggtttaaggaaggtacctcaaattatgttttcaaacgaccgggatgaaacaactgtatcctttctccttcgttgttttttgtttctgttttttttgacgtaaccgaaggagaaaaacaaggaaacgatgttgactcggttttttttttctgtttttttgacgtaaccgaaggagaaaaacaaggaaacaatgttgactcggtttgttttttctgtttttttttgacgtaaccgaaggagaaaaacaaggaaacaatgttgactcggtttgtggcgtgatcaaaggggagatggtggcggcgctaggatttgaatggtggaagaacacaatgcaaccagcaacaaatgacgcgaaagcacacaaattcaacaatgcagattattgaaagaaagtgcgaggctcaaaagggtgctgggataaggtataacctgaatttttatgtggttttgtggactgtaggaaaaaaaactcgataaactcaccgatcaacctggaaatctgataccaattgatgtagctgaggtgcccgatctttcggcgagtagagataattccgatttggcggaagatgacccttgcgatccgactacgacgagcaagcccgaggcgccaatgcaatcgctgaaccaactccctgtggttaccgaccttgctgatgcgagatcggcctgatcacgaagatcgtttcctgtgcgcaatcgaagaacgaacaagaacaagatgcgagcaatctaatctattactcgagggtggagttctgaatacacgaagacagcgcagatttgcgcgtgttcgagagtagctaaggctaacgtaaaacaaaactcggaaaataaaggaggcgcagctcctgtataaatagagagggggcgcagcccctaggggcggccaaccctaggtcgtccattatgggccgcaattgggctggtcgtctattcttctgggccttcgttctttaacaacatgatgtagttcaattctcttgcacgggcccgagtcactggcccaggtggaaggggtggcgcctggactggggaagatggtgcctgggctggagaaggtgctgctggtgtagatgtactcgtgttggtgttgatgtcctcatcacattccgaaaacgggtgtcggggtgcatacaagctcgagtttttgccaccggaaccatttcttcgtttttcgcaacgaacatgcccaatccactactttaggtccaaaactcatgattggggtggtttcgcgcaattttgttgccgcacgtcgctcattccgaaaacgggtgtcgcggtgcatataaagcacgagtttttgccaccggaaccatttattcgtttttcgcaacggacatgcccaatccactactttaggtccaaaacacatgtttggggtggtttcgcgcaatttcgttgccgcacgtcacccattccgaaaacgggtgtcggggtgcatacaaagcttgagttttttccaccggaaccatttcttcgttttcacaacgaacatgcccaacccactaccaatccactactttaggtccaaaactcatgtttggggtggtttcgcgcaatttcgttgccgcacgtcacccattccaaaaacgggtgtcgggttgcatacaaagcacgagtttttgccaccggatcaatttcttcgtttttcgcaacgaacatgcccaatcaactactttaggtccaaaactcatgtttggggtggtttcttgcaatttcgttgccgcacgtcacccattccgaaaatgggtgttggggtgcatacaagcacgagtttttgatcaagcggaaa

SEQ ID NO: 518 - DNA, 6651 bp, Zea mays
  source: /note="Zea mays BAC clone full insert sequence contig bacm.pk155.l13.fis82"
tctgcgccaacaaaattcgcgaaccccccaaacatgattttggacctaagtagtgattgggcatttcgttgcgaaaacgaagaaatggtccggtggcaaaattcgtgcttgaatgcactccaacaccgtttttcggaatgggtgacgtgcgacaacgaatttgcacgaaaccacccaaaacataagttttggacctaaattagtagattgggcatgttcgttgcgaaaaacgaagaaatggttccggtggcaaaaactcgtgcttgtatgcaccccgacacccgttttcggaatgggtgacgtgcgacaacgaaattgcgcgaaaccaccccaaacatgtgttttggacctaaagtagtgaattgtgagtgttcgttgcgaaaaacgaagaaatggttccggtggcaaaaacttgtgcttgtatgcaccccgacacccgttttcggaataagtgacgtgcaacaacgaaattgcgcgaaaccaccctaaacatgtgttttggacctaaagtagtggattgggcatgttcgttgcgaaaaacgaagaaattgatccggtggcaaaaacttgtgctttgtatgcaacccgacacccgttttcggaatgggtgacgtgcggcaacgaaattgcgcgaaaccaccccaaacatgagttttgtacctaaattagtggattgggcatgttcgttgtgaagaacgaagaaatggtttcggtggcaaaaactcgtgcttgtatgcaccccgacacccattttcggaatgggtgacgtgcggccacgaaattgcgcgaaaccaccccaaacatgagttttggacctaaagtagtggattaggcatgttcgttgcgaaaaacgaagaaattgatccggtgacaaaaactcgtgcttgtatgcaccccgacacccattttcggaatgggtgacgtgcggccacgaaattgcgcgaaaccaccccaaacatgagttttggacctaaagtagttgattgggcatgttcgttgcgaaaaacgaagaaatggttccggtgccaaaactcatactttgtacgcaccccgacaccccgtttttggaatgggtgacgtgcggcaacgaaattgggcgaaaccaccccaaacatgtgttttggacctaaagtagtggattgggcatgttcgttgcgaaaaaggaagaaatggttccggtggcaaaaactcgtgctttgtgtgcaacccgacacccgttttcggaatgggtgacgtgctgcaacgaaattgcgcgaaaccaccccaaacatgtgttttggacctaaagtcggcctgttcgttgcgaaaaatgaagaaacgattccggtggcaaaaactcgtgcgtgtatgcaccccgacagccgttttcggaatgggtgacgtgcggcaacgaaattgcacgaaatcaccccaaacatgtgttttggacctaaagtagtggattcagcatgtctgttgcgaaaaacgaagaaattgatcctgtggcaaaaactcgtgctttgtttgcaccccgacacccgtttttggattgggttacattacatgcggcaacgaaattgcgtgaaaccacgccaaacatgagttttggacctaaagtagtggattgggaatgttcgttgcgaaaaacgaagaaatggttccggtggcataaactcgtgctttgtatgtaacccaacacccgttttcggaatgagtgacgtgctgcaacgaaattgcgcgaaaccaccccaaacatgtgttttggacctaaagtcggcctgtttgttacgaaaaatgaagaaacggttccagtggcaaaaactcgtgcttgtatgcaccccgacacccgttttcggaatgggtgacgtgcggcaacgaaattgcgcgaaatcaccccaaacatgtgttttggacctaaagtagtggattgggcatgtccgttgcgaaaaacgaagaaattgatcgtgtggcaaaaactcgtgctttgtatgcaccccgacacccgtttttggattgggttacatgcggcaacgaaattgcgcgaaaccacgccaaacatgagttttggacctaaagtagtggattgggaatgttcgttgcgaaaaacgaagaaatggtttcggtggcataaactcgtgcttgtatgcaccccgacacccgttttcggaatgggtgacgtgcggcaacgaaattgcgcgaaaccaccccaaacatgaactttgggcctaaattagtggattgggcatgttcgttgcgaaaaacgaagaaatggttccggtggcaaaaactcgtctttgtatgcaccccgacacccgttttccgaatgtgcgacgtgcggtaacgaaattgcgcgaaaccaccccaaacatgagttttggacctaaagtagtggattggacatgttcgttgcgaaaaatgaagaaatggttccggtggcaaaaactcgtgctttgtatgtaacccaacacccgttttcggaatgggtgacgtgctgcaacgaaattgcgcgaaaccaccccaaacatgtgttttggacctaatgtcagcctgtgcgttgcgaaaaatgaagaaacggttccggtggcaaaaactcgtgcttgtatgcaccccaacacccgttttcggaatggtagacgtgtggcaacgaaattgcgcgaaaccaccccaaacatgtgttttggacctaaagtagtggattaggcatgttcgttgtgaaaaacgaagaaattgatccggtggcaaaaactcgtgctttttatgcaccccgacacccgttttcggaatggggggacgtgcggcaacgaaattgcgtgaaaccaacccaaacatgagttttggacctaaagtagtggattgggaatgttcgttgcaaaaaacgaagaaatggttccggtggcaaaaactcgtgcttgtatgcacaccgacacccgttttcggaatgggtgacgtgcggcaacgaaattacgcgaaaccaccccaaacatgtgttttggacctaaattagtggattgggcatgttcattgcgaaaaacgaagaaacggttccggtggcaaaaactcgtgcttgtatgcaccctgacacccgttttcggaatggtagacgtgtggcaacgaaattgcgcgaaaccaccccaaacatgtgttttggacctaaagtagtggattgggcatgttcgttgtgaaaaacgaagaaattgatccggtggcaaaaactcgtgctttgtatgcaccccaacacccgttttcggaatgggtgacgtgcggcaacgaaattgcgcgaaaccaccccaaacatgagttttggacctaaatagtggattgggaatgttcgttgcaaaaaacaaaatggttccagtgacaaaaacttgtgctttgtatgcaccgacacccgttttcggaatgggtgacgtgctgcaacgaaattgcccgaaaccaccccaaacatgagttttggacctaaagtaatggattgggcatgttcgttccgaaaaacgaagaaatggttccagtggcaaaaactcgtgcttgtatgcaccccgacacccgttttcggaatgggtgacgtgcgacaacgaaattgtgcgaaaccaccccaaacatgtgttttggacctaaattagtggattgggcatgttcgttgcgaaaaacgaagaaatggttccggtggcaaaaaaactcgtgcttgtatgcacgctcgacacccgttttcagaatgggtgacgtgcggcaatgaaattgcgcgaaaccaccccaaacatgagttttggacctaaagtagtggattgggcatgttcgttgcgaaaaacgaagaaatggttctggtggcaaaaacttgtgcttgtatgcaccctcaacacctgttttcggaatgggtgacgtgcagcaacaaaattgcgcgaaaccaccccaaacatgtgttttggacctaaagtagttgattgggcatgttcgttgcgaaaaacgaagaaatggttccggtggcaaaaactcgtgctttgtatgcaccccgacacccgtgctttgtatgcaccccaacacccattttcggaatgggtgacgtgtggcaactaaattgcgcaaaaccaccccaaacatgagttttggacctaaagtagtggattgggcatgttcgttgcgaaaaacgaaagaaatggatccagtggcaaaaactcgtgctttgaatgcaccccgacacccgttttcggaatgggtggcgtgcggcaacgaaattgcccgaaacaccccaaacatgagttttggacctaaattagtggattgggcatgttcgttgcgaaaaacgaagaaatggttccggtggcaaaaactcgtgcttgtatgcaccccgacacccgttttcggaatgggtgacgtgaggcaacgaaattgcgcgaaaccaccccaaacatgagttttggacctaaattattggattgggcatgttcgttgcgaaaaacgaagaaatgtttccggtggcaaaaacttgtgcttgtatgcaccccgacacccgttttcggaatgggtgacgtgcggcaacgaaattgcgcgaaaccaccccaaacatgagttttggacctaaagtagtggattgggcatgtttgttgcgaaaaacgaagaaatggttccggtgccaaaactcatgcttgtatgcaccccgacacccgttttcggaatgggtgacgtgcggcaacgaaattgcgcgaaaccaccccaaacatgtgttttggacctaaagtagtggaatgggcatgtttgttgcgaaaaacgaagaaattgttcccgtgccaaaaactcatgctttgtatgcaccccgacacccgttttcggaatgtgtgacgtgcggcaacgaaattgcgcgaaacccaccccaaacatgagttttggacctaaagtagtggattgggcatgttcgttccgaaaaacgaagaaatggttccggtggcaaaaactcgtgcttgtatgcaccccgacacccgttttcggaatgggtgacgtgcgacaacgaaattgcgcgaaaccaccccaaacatgagttttggacctaaagtagtggattgggcatgttcgttgcgaaaacgaagaaatggttccggtggcaaaaactcgtgcttgtatgcaccccgacacccgttttcggaatgggtgacgtgcggcaaggaaattgcgcgaaaccaccccaaacatgtgttttggacctaaagtagtggattgggcatgttcgttgcgaaaaacgaagaaatggttctggtggcaaaaactcgtgctttctatgcacagcgacacccgttttcggaatgagtgacgtgcggcaacgaaattgcgcgaaaccaccccaaacattagttttgtacctaaagtagtggattgggcatgttcgttgtgaaaaacgaagaaatggttccggtggcaaaaactcgtgcttgtatgcaccccgacacccattttcggaatgggtgacgtgcggcaacgaaattgcgcgaaaccaccccaaacatgagttttggacctaaagtagtggattgggcatgttcgttgcgaaaaacgaacaaatggttccggtggcaaaaactcgtgctttgtatgcaccgcgacacccgttttcggaatgagtgtcgtgcgacaacaaaattgcgcgaaaccaccccaaacatgagttttggaactaaagtagtggattgggcatgttcgttgcgaaaaacgaagaaatggttccggtggcaaaaactcgtgctttgaatgcaatccaacacccgttttcggaatgggtggcgtgcgacaacgaaatttgcccgaaaccacccaaaacataagttttggacctaaattagtagattgggcatgttcgttgcgaaaaacgaagaaatggttccggtggcaaaaactcgtgcttgtatgcaccccgacacccgttttcggaatgggtgacgtgcgacaacgaaattgcgcgaaaccaccccaaacatgagttttggacctaaagtagtgaattgtgagtgttcgttgcgaaaaacgaagaaatggttccggtggcaaaaacttgtgcttgtatgcaccccgacacccgttttcggaaaggtgacgtgcgacaacgaaattacgcgaaaccaccccaaacatgagttttggacctaaagtattggattgggcatgttcgttgcgaaaaacgaagaaatggttctggtggcaaaaactcgtgctttttgtatgcaccccgacacccgttttcagaatgggtgacatgcggcaatgaaattgcgcgaaaccaccccaaacatgtgttttggacctaaagtagaggattgggcatgttcgttgcgaaaaacgaagaaatggtttcggtggcaaaaactcgtgcttgtatgcaccccgacatccgttttcggaatgggtgacgtgcggcaacgaaattgcgcgaaaccaccccaaacattagtttttgacctaaagtagtggattgggcatgttcgttgcgaaaaacgaagaaatggttccgggtggcaaaaactcgtgcttgtatgcacccccgacacccgtttttcgaatgggtgacctgtggccacgaaaattgcgccgaacccccccaaacatgagttttgggactaaaattatggaatggggcttgttcgttgcaaaaaacaaaaaaagggttccgggggcaaaaaaccctggttttta

SEQ ID NO: 519 - DNA, 5933 bp, Zea mays
  VARIATION (3885)..(3885): /replace="c" or "g" or "t"
  misc_feature (3885): /note="Nucleotide given in the sequence has no preference with respect to those in the annotation for said position"
  source: /note="Zea mays BAC clone full insert sequence contig bacm.pk155.l13.fis83"
catgtttggggtggtttcacgcaattttgttgccgcacgtcactcattccgaaaacgggtgtcgcggtgcatacaaagcacgagtttttgccaccggaaccgtttcttcgtctttcgcaacgaacaagcccaatccactactttaggtccaaaactcatgtttgaggtggtttcgcgcaatttcgttgccgcatgtaacccaatccaaaaacgggtgtcggggtgcatacaaagcacgagtttttgccacaggatcaatttctttgtttttcgcaacggacatgcccaatccgctactttaggtccaaaacacatgtttggggtgatttcgcgcaatttcgttgccgcacgtcacccattccgaaaacgggtgtcggggtgcatacaagcacgagtttttgccactggaaccgtttcttcttttttcataacgaacaggccgactttaggtccagaacacatgtttggggtggtttcgcgcaatttcattgcagcacgtcactcattccgaaaacgggcgtcgggttacatacaaagcacgaattattgccaccgaaaccatttcttcctttttcgcaacgaacatgcccaatccaatactttaggtccaaaactcatgtttggggtggtttcgcgcaatttcgttgtcgcacgtcacccattccgaaaatgggtgttgggttgcattcaaagcacgagtttttgccaccggaaccatttcttcgtttttcgcaacgaacatgtccaatccactaatttaggtccaaaacttatgtttggggtggtttcgcgcaatttcattgccacacgtcacccattctgaaaacgggtgtcggggtgcatacgagcacgagtttttgccaccagaaccatttcttcgtttttcgcaacaaacatgcccaatccactaatttaggtccaaaactcatgtttggggtggtttcgcgcaatttcgttgccgcacgtcacccattccgaaaacgggtgtcggggaggggagcaaacaaagcacgagtttttgccaccggaaccgtttcttcgattttcataatgaacatgcccaaatcactaatttaggtccaaaactcatgtttgggttggtttcgcgcaatttcgttgccgcacgtcacccattccgaaaatgggtgttgggttgcattcaaagcacgagtttttgccaccggaaccatttcttcgtttttcgcaacgaacatgtccaatcaatccactactttaggtccaaaactcatgtttggggtggtttcgcgcaatttcgttgtcgcatgtcactcattccgaaaacgggtgtcgcggtgcatagaaagcatgagtttttgacaccaaaacagtttcttcgtttttcacaacgaacatgcccaatccactactttaggtccaaaactaatgtatggggtggtttcgcacaattttgttgccgcacgtcacccattccgaaaacgggtgtcggggtgcatagaaagcacgagtttttgccaacagatcaatttctttgttttacgcaactaacatgcccaatccacaaatttaggtccaaaactcatgtttggggtggtttcgcgcaatttcgttgccgcacgtcacccgttccgaaaacgggtgtcgcggtggatacaaagcatgagtttttgccaccggatcaatatctttgtttttcgcaacgaacattcccaatccactactttaggtccaaaactcatggtcggggtggtttcgcgcaatttcgttgccgcacgtcacccattccgaaaacgggtgtcggggtgcataaaagcacgcgtttttgccaccggatcaatttcttcgtttttcgcaacaaacatgcccaatccactactttaggtccaaaacacatgtttggggtggtttcgcacaatttcgttgccgcacgtcacccattccgaaaatgggtgtcggggtgcatacaagcacgagtttttgccaccggaaccatttcttcgtttttcgcaacgaacattcccaatccactactttaggtccaaaactcatgtttggcatggtttcgtgcaatttcgttaccacatgtcacccattccgaaaacgggtgtcggggtgcatacaaagtaggcctgggcgttcgggttacccgtaaaattcgggtggagtaattcgggtaattaaatttttgggttttggaaagtcatacctgaaattgcatagggtattatagtaccggaaaatttgggtacccgataattcgggttcgggtatcgggtactcccgaagtacccggatttaaaaaatagtcactactacccgcatgaaacataaacagatcactagtaaatgcacacaagaaaaatatgatacgataaaatacattaggttctcaggaacttctagactgctcttccgtctccacgaactgctagactccagtactcctcgaactgctagactcaggttctcgtatcgagtatggaccggcgaagtctacatgctgctgtgaggtcggccggcgaccctagaccgctggagttggatggcgttcttcagcagttgggctgaacgcgtggacgagtagacaaagacgaagaccctggacggctaaaccttgacaagtagacgaagaccctgcacggcgaccctggacggcatcggacacttggtggcggcggacggatcaggtcagctagtgccgtgtggtcagctggtgccgtgtgtagggtttgtcatattgccgtgtgtaggcctgggcggtgggctggtgtgagacgtgggttgggctctaccactgtagcactgtagaccctgtacgcatgtaggctaaggctgtaccgctgtaggcacctgtagctggcttaagatttccgggttcgggttattcgaataccggcaggtgctacccgaattacccagaataatttcgggtttcataagttggtaaccgaaattcccaaataaaattcgggtacccgatattatgggtttgggttcaggaattccgggttcgggtatcgggttacgggttttttgcccaggcctaatacaaagcatgagtttttgccaccagatcaatttcttcgtttttcgcaacggacatgcccaaggtgatttcgcgcaatttcgttgccgcacgtcatccattccgaaaacgggtgtcggggtgtatacaagcgcgagttttttccatcggaactatttcttcgtttttcacaacgaacatgcccaatccactactttaggtccaaaacacatgtttggggtggtttcgcgcaatttgcttgccgcacgtcacccattctgaaaatgggtgtcggggagcatacaaagcacgagtttttgccaccggaaccatttcttcatttttcgcaacgaacatgcccaatccactaatttatgtccaaaactcatgtttggggtggtttcgcgaaatttcgttgtcgcacgtcacccattgcgaaatgggtgtcggggtgcatacaaagcacgagtttttgccaccggatcaatttcttcgtttttcgcaacgaacatgcccaatccactactttaggtccaaaacacatgtttggggtggtttcgcgcaatttcgttgcagcacgtcacccattccgaaaacgggcgtcgggggtgcatacaagcacgagttttcgccagcggaaccatttcttcatttttcgcaacgaacatgcccaatccactactttaggtccaaaactcatgtttggggtggtttcacgcaatttcgttgtcgcacgtcactcattccgaaaacgggtgtcgcggtgcatacaaagcacgagtttttgccaccggaaccatttctctgtttttcgcaacgaacatgcccaatccactactttaggtccaaaactcatgtttgaggtggttttgcgcaatttacgtgtcgcacgtcacccattcccaaaacgggtgtcggggtgcatacaaagcacaagtttttgccactggatcaatttcttcgtttttcgcaatgaacattcccaatccactactttaggtccaaaactcatgtttggggtggtttcgcgcaattttgttgccgcatgtaaaccattccgaaaacgggtgtcggggtgcatacaaagcacgagtttttgccacaggatcaatttcttcgtttttcgcaacggacatgcccaatccactactttaggtccaaaacacatgtttgggtgggttcgcgcaattttgttgccgcacgtcacccattccgaaaacgggtgtcggggtgcatacaaagcatgagtttttgccacaggatcaatttcttcgtttttcgcaacggacatgcccaatccactactttaggtccaaaacacatgtttggggtgatttcgcgtaatttcgttgccgcacgtcacccattccgaaaacgggtgtcagggtgcttacgagcacgagtttttgccaccgaaaccattacttcgtttttcgcaacgaacattcccaatccactactttaggaccaaaactcatgttcggggtggtttcgcgcaaattcgttgccgcacgtcatccattccgaaaacgggtgttagggtgcatacaaagcacaagtttttgccactggatcaatttcttcgtttttcgcaacgaacatgcccaatccactactttaggtccaaaacacatgtttggggtggtttcgcgcaatttcgttgccgcacgtcacccattccgaaaacgggtgtcggggtgcgtacaagcatgagtttttgccaccggaaccatttcttcgtttttcgcaaccaacaagcccaatccactaatttaggtccaaaactcatgtttggtgtggtttcgcgcaatttcgttgccgcacgtcacccattccgaaaatgggtgtcggggtgcatacaagcatgtgtttttgccaccggaaccatttcttcgtttttcgcaacgaacatgcccaatccactactttaggtccaaaacacatgtttggggtggtttcgcgcaatttcgttgccgcacgtcacccattccgaaaacgggtgtcggggtgcatacaaagcatgagtttttgccaccggaaccatttcttcgtttttcgcaacaaacatgcccaatccactactttaggtccaaaacacatgtttggggtggtttcgcgcaatttcgttgccgcacgtcacccattccgaaaacgggtgtcgagttgcattcaaagcacgagtttttgccaccggatccatttcttcgtttttcacaacgaacatgcccaatccactaatttaggtccaaaactcatgtttggggtggtttcgcgcaattttgttgtcgcacgtcactcattccgaaaacaggtgcatacaagcacgagtttttgccaccggaaccatttcttcgttttttgcaacgaacatgcccaatctactttaggtcaaaaactaatgtttggggtggtttcgcgcaatttcgttgccgcacgtcacccattccgaaaacggatgtcggggtgcatacaagcacgagtttttgccaccgaaactatttctttgtttttcgcaatgaacatgcccaatcctctactttaggtccaaagcacatgtttggggtggtttcgcgcaatttcattgccgcacgtcaccaattccgaaaacgggtgtcggggtgcatacaaagaacgagtttttgccaccggaaccatttcttcgtttttcgcaacgaacatgcccaatccactactttaggtccaaaactcatgtttggggtggtttcgcgcaatttcgttgtcgcacgtcacctgatgcggacatcaacaccaacacgagcacatctacaccagcagcaccttctctagcccaggcgccaccccttccacctgggccagtgactcgggcccgtgcaagagaattgaactacatcatgttgttaaagaacgaaggcccggaagaatagacgaccagcccaattgcggccca

SEQ ID NO: 520 - DNA, 757 bp, Zea mays
  VARIATION (35)..(86): /replace="c" or "g" or "t"
  misc_feature (35)..(86): /note="Nucleotides given in the sequence have no preference with respect to those in the annotations for said positions"
  source: /note="Zea mays BAC clone full insert sequence contig bacm.pk010.m07.fis1"
ttaccctcctaaagggaaccaaatcaaacacgcgaaaaaaaaaaaaaaaaaaaaaaaaaaaaaaaaaaaaaaaaaaaaaaaaaaaatgtaagtgcaacaaaacaaaaggcagtttgtgtgccttctttttatagtttcagaaatcagattgttgttctgagcttttggtgatactatttgtgtaacggctcgcgtctctattacggtttggactaggaccagcacaacaccattgtggaacgtttattcaacttgttgtggctaacgtggtactagctattccttggaactattgtttgaacagccacctataaatccacaaaattttctacaacaccaccaggttgtgctagcagccactgttgttgttgttcgtgctgtttgccagcgcctcctgctttgcgtggtgagaacttgtaagaacttgtttaaccagtttgagagtgagagattacaacaatgattcctagtagtttatagaatcaaagatattttttattgtttcttgtctttactaaacatggcaggtgatatggacatttttgacccaaccgaacgttatattggaggcatcattcaacacttgcctttatatgccggtaaattcgatcctcatgcatacattgattgggagctaaaggtagataaggaatttgataagcatgatctatctcaaaacaaaagatttatattgcctctaatttgttactgagcacgcattgatggatgggaatacatttgagggacaacaaagtcc

SEQ ID NO: 521 - DNA, 746 bp, Zea mays
  VARIATION (44)..(99): /replace="c" or "g" or "t"
  misc_feature (44)..(99): /note="Nucleotides given in the sequence have no preference with respect to those in the annotations for said positions"
  VARIATION (746)..(746): /replace="c" or "g" or "t"
  misc_feature (746): /note="Nucleotide given in the sequence has no preference with respect to those in the annotation for said position"
  source: /note="Zea mays BAC clone full insert sequence contig bacm.pk010.m07.fis2"
agcagccgcattaaccctcctaggggaacaaattcagatcgccaaaaaaaaaaaaaaaaaaaaaaaaaaaaaaaaaaaaaaaaaaaaaaaaaaaaaaaattgcaaagctgaaagggaagtgcagggacgacgtgctagtgcaaggtctaatgtttctgcaggaaaatctacaccatggcaacagcgcacgactacgtccatgaccggccgtacaccagcaccaactccctcgccaagtcgaccagcacccccgccttcctccggcgacaaaccacgtgcatcttccacaaattcagcaaccaaatctgcccagaaaccagcaggtagtgcctcttcagtagcctccacgggtagaacaagagatgttctgtgttatcgatgcaagggctatggacacgtgcagcgtgattgtcctaatcagcgtgttttggtggtaaaagacgatggtgggtattcctctgctagtgatttggatgaagctacacttgctttgcttgcggctgatgatgcaggcactaaggaaccacccgaagaacagattggtgcagatgatgcagagcattatgagagcctcattgtacagcgtgtgcttagtgcacaaatggagaaggcagagcagaatcagcgacatacgttgtttcaaacaaagtgtgtcattaaggagcgttcatgtcgtttgatcattgatggaggtagctgcaacaacttggctagcagcgacatggtggagaggcttgcacttacga

SEQ ID NO: 522 - DNA, 764 bp, Zea mays
  VARIATION (6)..(107): /replace="c" or "g" or "t"
  misc_feature (6)..(107): /note="Nucleotides given in the sequence have no preference with respect to those in the annotations for said positions"
  VARIATION (719)..(719): /replace="c" or "g" or "t"
  misc_feature (719): /note="Nucleotide given in the sequence has no preference with respect to those in the annotation for said position"
  source: /note="Zea mays BAC clone full insert sequence contig bacm.pk010.m07.fis3"
tacccaaaaaaaaaaaaaaaaaaaaaaaaaaaaaaaaaaaaaaaaaaaaaaaaaaaaaaaaaaaaaaaaaaaaaaaaaaaaaaaaaaaaaaaaaaaaaaaaaaaaaatcctgcacaacaccctttgtatggaacagagtgtgtcgctgattcttctcgggcaaagcaacctgtgtactaagaacacgctgcacaacaagactttcatacctatcagcgtcgctcgggttgacatgtacctccgcctgagctgcatggttagtggcaagtagtgcatgttcaatttctttagaatcactagcggaagagtactcaccatcgtcacgaatgagcaaagtgcgcttgtttgggcagtctcgaatcacatggccaaatcctctacagcgatgacactgaatatcccgtgtacgacctgtgggtggggtagtgctggctggtttggtcgtcttctcgcgtggagtagtggtggacgtggatggcgcagggggaactggtgctgaggtggatgtcgagcttcgtcctgcaaaagggttagaatatgtcttcgagcggcgtccctgcacttcacgttcagctttgcaagcatattcaaataaagtagtcatatcataatattccttataatcaagtatatcctggatttcgcggtttaaaccaccacgaaaacgtgccatagcagcatcgttgtcctccaatatcccacaacgaatcatacctttatgtaattcctggaaatagtcctcaacatattgagaaccttgctga

SEQ ID NO: 523 - DNA, 747 bp, Zea mays
  source: /note="Zea mays BAC clone full insert sequence contig bacm.pk010.m07.fis4"
cgacggcgtatagactcctatcgggcgaatgggtttaaatacaagaggggaggtcgacggtatcttttccgcttgatggtgccattcgggagtggcctacaccgacgacggtcacacaaattcggagctttcttggacttgccggtttctaccgcagatttgttcgtgattttagctccattgcagcgcctctacatgagcttacaaagaaagatgtgccgtttgcttggagtgattcgcaggaggaagcattcagcactttgaaagataagttaacccaagctcccctattgcaattgcctgattttaataaagtgtttgagcttgaatgcgatgctagcggtgttgggctaggtgctgttttgttacaagaaggaaaaccagttgcttattttagtgaaaaattaagcggtgctagtctgaaatattctacttatgataaggagctttacgcgttagtgcgcactttgcatacatggcagcactatctttggcatcgtgagttcataattcattctgatcatgaggctttaaaacgtattcgtacccaaacaaatctgaaccgtcgtcatgctaaatgggtagaatttattgagtcttttccttacattattaaacacaagaacgggaaggacaatgttattgctgatgctttgtctcgtcgctataccatgctgtcacagttagattttaaaatctttggtttgcacactgtgaaagatcaatatgttgacgatgctgatttta

SEQ ID NO: 524 - DNA, 772 bp, Zea mays
  VARIATION (1)..(1): /replace="c" or "g" or "t"
  misc_feature (1): /note="Nucleotide given in the sequence has no preference with respect to those in the annotation for said position"
  VARIATION (9)..(39): /replace="c" or "g" or "t"
  misc_feature (9)..(39): /note="Nucleotides given in the sequence have no preference with respect to those in the annotations for said positions"
  source: /note="Zea mays BAC clone full insert sequence contig bacm.pk010.m07.fis5"
agacccgtaaaaaaaaaaaaaaaaaaaaaaaaaaaaaaaatcaaaaaacggcgaggtcgacggtatcgtttacgcttagataaagtcgtcctcgactcaaacgtgtcattctctcccaagtatggtgttaaatctgcaatattaaaagaggaactgaccccaaaatctgcaggcaactgaactttatatgcattattattatttttgtgaagtactttgatgggtctagcagctcttggttgtaatttagatttgcgcatatcagggaatctatctgatgtagctgaggtgcccgatcttttggcgagtagagataattccgatttggcggaagatgacccttgcgatccgactacgacgagcaagcccgaggcgccaatgcaatcgctgaaccaactctctgtggttaccgaccttgctgatgcgagatcgacctgatcacgaagatcgtttcctgtgcgcaatcgaagaacgaacaagaaaaatatgcgagccatctaatctattactcgagggtggagttctgaatacacgaagacaacgcagatttgcacgtgttcgagagtagctaaggctaacgtaaaacaaaactcgaaaataaaggaggcgcagctcctggataaatagagggggcgcagcccctaggggcggccaaccctaggtcgtccactatgggccgcagttgggctggtcgtctattcttctgggccctcattcttcagtagcatgacgaagttaagatctctggcacgggcccgagtgattggcccag

SEQ ID NO: 525 - DNA, 754 bp, Zea mays
  VARIATION (6)..(105): /replace="c" or "g" or "t"
  misc_feature (6)..(105): /note="Nucleotides given in the sequence have no preference with respect to those in the annotations for said positions"
  VARIATION (732)..(732): /replace="c" or "g" or "t"
  misc_feature (732): /note="Nucleotide given in the sequence has no preference with respect to those in the annotation for said position"
  source: /note="Zea mays BAC clone full insert sequence contig bacm.pk010.m07.fis6"
atcgcaaaaaaaaaaaaaaaaaaaaaaaaaaaaaaaaaaaaaaaaaaaaaaaaaaaaaaaaaaaaaaaaaaaaaaaaaaaaaaaaaaaaaaaaaaaaaaaaaaaactatgaagggccgcagaacttcattcatcactcgcataaaagtgctgggagcattagtcaatccaaatggcataaccaaccattcatataaaccaaatttcgttttaaaagctgttttccattcatcacccagtttcattctaatctggtggtaaccactacgcaaatcaatcttagtgaaaataatggcaccactaagctcatctagcatatcatcaaggcgtggtataggatagcgataacgtatagtgatgttattaatagcacgacagtctacacacatacgccatgacccatctttcttgggaacaagtaacacaggaacagagcaagggctaagagactcacgaatgtatcctttgtcaagcaacgcctgtacctggcgctgaatctccttcgtctcatccggatttgtacggtatggtgcgcggttcggaagctgtgcgccgggaatgaggtcgatctggtgctcaatgccacgaagcggtggtagacccgatggtaagtctttgggaaagacatcagcgtactcctgcaaaaggttagcaaccatagggggaatagccaaagatggtgcatcatcaagtgaaatgaggacactagagcatacaagtgcatagcatggcaaatgagcaccgtgtagatcatc

SEQ ID NO: 526 - DNA, 1047 bp, Zea mays
  source: /note="Zea mays BAC clone full insert sequence contig bacm.pk010.m07.fis7"
ttctatgccaagacaaatacatataaagcaacataccaaagtgataatcagttcataaagatttaccaatgtcaaagtaaattctactccattgcaaattgtaagtagtttcagctttattctgtcaatcttgtctaacttttgaccaaatttatagaaaaatatattatcaaataaatgcatatgttttttctcaaacgttagttaaatgcatatgttttctttctagaacattagttaaatgcatattacataaagtcactaacattatgacataataggcataaggacctaaacctaaacaacataaaagtaataatatttaaatagcaatataagaccagtacctgaagctgaagtgtgtgtagaatgaaattacgcacaatttcatattcccccttaagtagaaaagcaatgccggatggtatgaagtcccgaataaacacctgatcgtagttcaccggatcactgtcatttggatcgttggcagcaatcgtcccaacaggactgccacaatagtaaaccattgactcctgcagaagttcccaggcctcatcctcaaccgaagaggacttccgcctctgaggtggagtcttggcagcactcccatttagaccaccattgccacttacagcttgaccaagcacgctgatgtcgccaagaacctggctagcgttattcatggcatccttgacccaaggaccgttcccctctgtaacccggtcatcgatccgctggcacagccgcctgaccgacctcagcctcgggatccttaggacgccttgcagtgtcctggcgtttggcaccgaattggtgcggctgtttatcctcgtaaagtctggccgaagggacagaatggatgccggggagtgggtggtgaacgcccccggcatggtgtgtagagccaccaccgcgatccccattggcgcttgttcccagtccgcccagcgtctgcaagaagcgtgacagctacaatttggatacattcatacaaaaaagataaatcagaggaacccagcaagaatcgaacgaatttggaagtagatg

SEQ ID NO: 527 - DNA, 750 bp, Zea mays
  source: /note="Zea mays BAC clone full insert sequence contig bacm.pk010.m07.fis8"
tgttctattagcttcgttttgcaccagttaggatggctaaaggaccacccgagtgcgcgattggattacgccggcaagcctctgccgtcacacttggctgtgcggccgccctggggttcggaggaaggagacacggcgtgggccgttagatccacgatgtgcgctctagattagatctaggggtaacctaatttgagccgttgatttgatcaccggtggataagattagatcccgtttgcataaaatcttgaccctttgatcgggatcggccggtccgtaattcgtaccggttcgcgaattggtttgggccgtggattgctgatatgacagcttagattaaacgataccccttcgacacatacaatttacataagagaccctctggttctaggttatcagcccacgatccagagtttgtatcctatgtctcgggcgttttacacaaaagcccctgcactcctctatttttatgcgcgcagtccagaatcatagataaattcagaaattcaattagaaaatgatttttagtgttaaaataattccagaaatgtatttaattcatagaaaaccatcatagctccaaattaattcatttcagttcctataattttgtaatattattatttatcacttagtacaactattttaacaagaaagccatattaaactagatcacctaattaattttgtatcaagcacacgcggacttcagaaaatcataactaatttattttatctatgtttcaatc

SEQ ID NO: 528 - DNA, 792 bp, Zea mays
  source: /note="Zea mays BAC clone full insert sequence contig bacm.pk010.m07.fis9"
ttccctgaatactttgctgaatcaacttgactacaaaatctttggattagagacgattaaagaccaatatgttcatgatgctgattttaaggatgtgttgctgcattgtaaagatgggaaaggatggaacaaatatatcgttagtgatgggtttgtgtttagagctaacaagctatgcattccagctagctccgttcgtttgttgttgttacaggaagcacatggaggtggcttaatgggacattttggagcaaagaaaacggaggacatactggctggtcatttcttttggcccaagatgagaagagatgtggtgagattggttgctcgttgcacgacatgtcaaaaggcgaagtcacggttaaatccacacggtttgtatttgcctctacccgttcctagtgctccttgggaagatatttctatggattttgtgctgggattgcctaggactaggaagggacgtgatagtgtgtttgtggttgttgatagattttctaagatggcacatttcataccatgtcataaaactgacgatgctactcatattgctgatttgttctttcgtgaaattgttcgcttgcatggtgtgcccaacacaatcgtttctgatcgtgatgctaaatttcttagtcatttttggaggactttgtgggcaaaattggggactaagcttttattttctactacatgtcatcctcaaactgatggtcaaactgaagttgtgaataggactttgtctactatgttaagggcaggtctaaaggaagattataagatgtgggaggactg

SEQ ID NO: 529 - DNA, 753 bp, Zea mays
  source: /note="Zea mays BAC clone full insert sequence contig bacm.pk010.m07.fis10"
aggatcgataacatagatagggccttctcatgatatattttatattgctggcaagtacaacaacataggacaatttcttgtgcatagaatttctatttcatctagatatgttgtttcttcactttgtgcaaataaggtattggtatgttctcaagaagaaaagaatctcttgtttccatgtactttagttgaagtttcaggtttatatttgaaagacattaataaaagcttagtcatcaacatcaatcatgatgcaaaaccgaggacggtttgctatcaagaaggggagaatgatgagaacataacccacacagatatgaccatgttaatggctcctgctacaaagacattgaggaacaaagaagttgattggggaccaagtaatgatatttccaacatttccaacaaagcaagcacatcatcaaatttaaagatatacttgggtgaggagcatacactagagtcgaggacgactctattacaagaaggggaggatgatgaggacatcactgccatcaatacaccacaccagcgacctccttcaccatttaataatggaccagtgaaacgagtccgtgcacgtaaatttaattatcaggtgaactcgttccttgttgttgaagctaatcgttccttaaatgaggtactaataccttgtgattactttattattctaaggtgtttgggaggtgaaacatctagaatttgagaaggcaacaaggcattaaaagctgctccactttgagggatttc

SEQ ID NO: 530 - DNA, 629 bp, Zea mays
  source: /note="Zea mays BAC clone full insert sequence contig bacm.pk010.m07.fis11bacm.pk010.m07.fis11"
gctctcgctacttgcttgcaagcgcgcgtgctagttcagccgcccgtcttcttgtcttcggaaccccaccatattggagtttgatctttaaacctacatttagatctggtaatttagtacttgttctacttgttcttgctagttcttcgattgcttgcaggacgagtgccctagtggccagggtgtcacgctccacaagatcgtgacagccataggaggtggtgtatcggttgctaaggcgcagcgtctttggaaggctgtagtcgggccgtgaacgtcgtctcctcccccaatcgagttattccacaccctctcatcgaaagatcgggcaatcacccaacgggtgcacatcagttggtaatcagagcaaggtttatcggtgagagatttacttttcttcgctgttttcttatctcctatagtccagaaaaagccaaaaaatagtagattagttttaccgcaatcctataaaccattgagcatttactagtactacttagttagggcttgttgagtttttggttgcatcggttgtgtcgagttgctggtcttagtttattcctttagagttttgagttctaccacgttttggtcaccacgagatccaccatcaccaaaaacatctctgg

SEQ ID NO: 531 - DNA, 789 bp, Zea mays
  source: /note="Zea mays BAC clone full insert sequence contig bacm.pk010.m07.fis12"
cataaggaaacgattcgataaattcaacacacttagcatgtctacggttcagttttccttgactacgaatatgtttcaaagattcatgatcagaatgaataacaaactctttgggccacaaataatgctgccatgtttctaatgttcgcacaagagcatataattccttatcataagtagaataatttagaacagacccactcaatttttcactaaaatatgcaacaggtttgccttcttgtaacaaaacaccacccaatccaattccactagcatcacattcaagctcaaaagtcttattaaaatcaggaagttggaggagaggtgcatgtgtcaacttatctttcagcacgttgaaagcgtgctcttgtactttgccccaactaaaatgcactcccttcttcgtaagctcattcaaaggtgcagcaatggtgctaaagtccttcacaaaacggcgatagaagccagcaagtcctaggaaactccgcacctgtgtgatagtctttggcataggccatccatgtatcgcttctaccttggcttgatcaacctcaattccctgtggagtcacaacataaccaagaaacgaaactcgatcggtgcaaaatgtgcacttctcaaggttaccaaataaacgtgcatctcgtaaagcattaaaaacagcacgcatgtgatcaacatgttcatccatagatttgctgtagatcaatatatcatcaaagtatactaccacaaatttttcaatgaaggcacgcaaaacctcgttcattaatctcatgaaagtgctag

SEQ ID NO: 532 - DNA, 193 bp, Zea mays
  source: /note="Zea mays BAC clone full insert sequence contig bacm.pk010.m07.fis13"
ggtggtgtgtgcctgtagtcgcagctatatgaaaggttgaggtgggaggattgtttgagcctgaaaggcagaggttgcagtgagccgtggtcatgccactgtactccagactgggtgacagagcaagaccctgtctaaaaaaaaaaaaaagtgtgcttttcccaacacttagggaatcaaatccctggaactg

SEQ ID NO: 533 - DNA, 847 bp, Zea mays
  source: /note="Zea mays BAC clone full insert sequence contig bacm.pk010.m07.fis14"
gttccaaagtggtcaatgtgttgttggtaacaatttgtgttgtttctaattgaccaatgcgctcattggtgacttgaacatcttcgttgagggcatctgtgtgcaaccttacttgacgttcgaaatgttgtatgatgcccacggttcgtggagaatgtggaggtcgcgcatttgcatcctctgccatggttagtgcaaaagagatacaaaaacaagtaatgcagcctagtagttgctatgatgtggatggataaacactgcctcactaggaagaaatcaagctcttacaagttctcaccacgcaaagaaagtggcgctggcaaacagcaagaacaacaacagtggctgctagcacaacctggtggctgctagcacaacagtggctgctaaaactatagttccaaggaatagctagtaccacattagccacaacaagttgaataaacgttccacaatggtgttgtgctggtcctagtccaaaccataatagagacgcgagccgttacacaaatgatatcaccaaatactcaaaacagcaagctgacttagaaaattgtgaaacggtggcacacaaactgtctttgttttgttgcacatggaattttatctaccaatattcttactgtgatttttttctcttttttgtacgtgcttttttatcagcacgactttttttgtgcacttgccttttccttttccttgttttttttgaactacagctagagaacagctagagaactaaagatggagatctaaacaaggtggcacgaactcgaaactcttgcagcaagaactttgggaccagcactcgacacaaatgcagcaaccgtgaattcaacaagtcgaa

SEQ ID NO: 534 - DNA, 691 bp, Zea mays
  source: /note="Zea mays BAC clone full insert sequence contig bacm.pk010.m07.fis15"
ctgctacacccccattgtacacctggatcctctccttacgcctataaaaggaaggaccagggccctcttagagggggttggccgcgcggggacgaggacgagacaggcgctcgcttgaagccgctcgctccctctcccgcgtggacgcttgtaaccccctactgcaagcgcacccgacctgggcgcgggacgaacacggaggccgcgggattcccagctctctcacgccggtctccggccgcctcgatctccccccttcgcgctcgccctcgcgctcgacccatctgggctggggcacgcggcgacattcactcgtctgcccagggaccctccggtctcgaaacgccgacaatttgttatcatgtatgatcgactatgcattgtggttgctaattaatttaaaatctctctagttatctatgtgtgctattaaaattcatttaaattgtatttgcatattttgttaaaaattaaatattaattcatttaaattgtatttgcatatttctgttaaaaattaaaatattaattcatttaaattttattttcatatttctgttaaaaattaaaatattaatatggtaatcaaatcacaatcacagacggtttttcattagggtccgtttgtgaaaagaatagagcaccacaggcggtcctaaaaaaaccgcttgtgatactaatacatcacatg

SEQ ID NO: 535 - DNA, 951 bp, Zea mays
  source: /note="Zea mays BAC clone full insert sequence contig bacm.pk010.m07.fis16"
tatagtaggggttctatacaaaatatctaaataattacattatatgaagacaacgatccacctcaaccatagttgattgagaggcgacgacctagacctctcacgaactcatcgctgtatcattcatgctccttttcttgcggtacctattcctgacctggggggttgtgagtatagcaagagtgagctcacatacattcattgcattaataagttgtgggaaataatgtgcatgagatcacttatggtggggcccttgtgaagtgtaaggcttatcaacgaataagggttcaggctcagtattgcttttaataaattggtcaaaattttattagcatttactaagtataactagataccatcccattaagagaccacaattaataataaatcccataatgcaagtcaaacgacagattaaatttagtttcataaattaatcatgcaagagtcttgagtcattcttgactgtgagcacgacttatatactagttttacaccctgtagaggttgtgcatatttacccacaataagtgtttcccatttagcgatataggaatccctcgtccaaaaagctttacagacagtccgacctgaggacctccctatacctgcactcctccaccccggttgccccttttgggaaaggattaactcacactagctttcctaattagtcagccaagggtgttccattccacccttgtggtagcactgttatttcaagttaagctccatgttacaattaacacaatagtcttatcatgaaccataattaaaccaacaacaatagtggaacatgatcatagttcagtataacattaatcccaaaactaggtagagcaataacaagtctacccaattgttcatttgttttgcaggtgtggggtaaacaaaactagggtaacctattgggtcccaacaaattaaactgagcatgtcatagtgatt

SEQ ID NO: 536 - DNA, 800 bp, Zea mays
  source: /note="Zea mays BAC clone full insert sequence contig bacm.pk010.m07.fis17"
atcgttttacttaaacgggggaggcggtctcatggggcactttggcgtctacaagacacatgaggtgttggctgcccacttcttttggcctcggatgcgcgctgatgttgagcgccttgttgcacgctgcactacttgtcagaaagctaagtcacggttgaacaaccatggtttgtatatgcctttgcctgttcctacttccccttggattgatatttcgatggattttgttttgggattgcctagaactaagaaggggaggtgataaacccaacgggtagaagggtgcccgatctttcgatgagagatgatggaggtgaaaaacttgttggagaacgacgttggctgcccgactaccacaaccaagatggtgtggcgccttgagcgacaggtacactgtctcctgataactacgatttggggtggaggtcgacgttgtgctatccgactacaataaccacaagggtgctgcgccttagcgatagttacaccggctcctgttgttgctgctcttgccgtgccaagaacagccttgaacctgcaagcaatcgagaacaaggaagaacaagataaaaagcagacgctcacggatctgatagagttggggttctgtttcaagtatccgggtggtctagccgacacacgcgtttacaaggaagtagcaaaggctaaacttacatcaaacaaaaacccaagttctttggtggctgctagttgcttaaatagaggaatagaaaggagttctaatggagaacgaaactctctcggcagtttctggatgcctcgtttggttgctgtca

SEQ ID NO: 537 - DNA, 1317 bp, Zea mays
  VARIATION (488)..(488): /replace="c" or "g" or "t"
  misc_feature (488): /note="Nucleotide given in the sequence has no preference with respect to those in the annotation for said position"
  source: /note="Zea mays BAC clone full insert sequence contig bacm.pk010.m07.fis18"
gtcattagggggatgacgaaccacacggcgtgcacgaccacgtcgatctccgtcgtcctgctcagtgtcaccgccgtagtcctgctccatctttgtggtcaacgcatcaaggcgtgccaggatggtgtcgagtgtggtgcgagtcgccgtttgagcaaggtcaagctggttgaaacactcggtcgtcgaagtgaccgttgaatcaagccgttcatgcatcgtcctaatgtcagcagcaagtccatcaacttgtccccttacttcctgcaactgggcatccaccgtgtcgtgtgctcctgccatagttagcgcaaacaccaaaaggagaaaaaaaccaacgacaaaaacaggggtgtactgcttacaaggcgctcacactagtgctgttatcaagttcttatccgttcttaccaagccacagtggtgaactgcaagcaacaggtggaaccggtgaaagattggatgagcgattgcgtggagaaacagaaacctgctcgtcgtagaaatatgtggagttgtgggtaggctgcactcaagtcaaggattagcacgatcaaacaataatgcaaagttttattatagtgcaaaacacgaaactatattgctggccacaggtgcaaaggatggatggaactagcagaatggcagtaccgtaaatactgtactagtgatgccaaaaaaggcactagtagaaatcacaggtgattttgtttttcttttttgtatgatttttttgatatttttctcagcacaagaagcaacaagataggagctagacgaagtttcacctaaaacagagatcagatgtggtctacagaaaatcaggaagttctctgaaaagcgtgcgagaactttgacgaatttttttctttattttcctgaatttttttgacaattttgtcgaaaccaaacagaccgaaggtgagtttggccggcctcagaatggtgtcaaatagctcctgtaaaaatttcagattttttggacacccgagcgaaaagttatgcccggtttaaggaaggtacctcaagttatgttttcaaacgaccgggatgaaacaaccatatcctttctccttcgttgttttttgtttctattttttttgacgtaaccgaaggagaaaaacaaggaaacgatgttgactcggtttgtttttttttctgtttttttttcgtaaccgaaggagaaaaacaaggaaacggccgttgactcggtttgttttttctgttttttttacgtaaccgaaggagaaaaacaaggaaacgatgttgacttagtttgtggagtgatcaaaggggagatggtggcggcgctagcct

SEQ ID NO: 538 - DNA, 978 bp, Zea mays
  source: /note="Zea mays BAC clone full insert sequence contig bacm.pk010.m07.fis19"
gcaaccgcgaggcgacggatcttaaccttgatcccctctctatttattcaggagctacgcctcctttattttgggagttttgttttacgttagccttagctactctcgaacacgcgcaaatctgcgctgtcttcgtgtattcagaactccaccctcgagtaatagattagattgctcgcatctttttcttgttcgttcttcgattgcgcacaggaaacgatcttcgtgatcaggccgatctcgcatcagcaaggtcggtaaccacagggagttggttcagcgattgcattggcgcctcgggcttgctcgtcgtagtcggatcgcaagggtcatcttccgccaaatcggaattatctctactcgccgaaagatcgggcacctcagctacatcagggcccgtgcaagagaattgaactacatcatgctgttaaagaacgaaggcccggaagaatagacgaccagcccaactgcggcccataatggacgacctagggttggccgcccctaggggctgctccccctctctatttatccaggagctgcgcctcctttatttttcgagttttgttttagatctagctttagctaccctagaacacgcacaaatacgtgctgtcctctgtgattcagaactccacctcgagtgatattaagattgctcgcatctttttcttgttcgttcttcgattgcgcacaggaaacgatcttcgtgatcaggccaatctcgtagcagcaaggtcggtaaccattaggagttggttcagcgattgcattggcgcttcgggatcgctcgtcgtagtcggatcgtgagggtctacttccaccaaatcggaattatctccactcaccgaaagatcgggcactccagctctatcagaacttgcccaatcccatactttaggtccaaaacacatgtttggggtggtttcgcacaatttcgttgccgcacgtcacccattctgaaatgggtgtcggggt

SEQ ID NO: 539 - DNA, 1130 bp, Zea mays
  source: /note="Zea mays BAC clone full insert sequence contig bacm.pk010.m07.fis20"
gtagtgtggatgtcttcatcagttttttttcctacagtccacaaaaccacataaaaattcaggttagaccttatcccagcaccattttgagcctcgcactttctttcaataatctgcattgttgaatttgtgtgctttcgcgtcatttattgctggttgcattgtgttcttccaccattcaaaccctagcgccgccaccatctcccgtttgatcacgccacaaaccgagtcaacatcgtttccttgtttttctccttcggttacgtaaaaaaaacagaaaaaacaaaccgagtcaacggacgtttccttatttttctccttcggttacgaaaaaaaacagaaaaaaaaacaaaccgagtcaatagccgcctccttgtttttctccttcggttacataaaaaaaacagaaaaaaagaaaacgaaggagaaaggatactgttgtctcatcccggtcgttttaaaacataacttgaggtaccttccttaaaccgggcataacttttcgctcgggtgtccaaaaaatctgaaatttttacaggaggttgttgacaccattctaaggccggccaaactcaccttcggtctgtttggtttcgacaaaattgtcaaaaagttcgggaaaataaagaaaaaaattcgtcaaagttctcgcacgcttttcagagaacttcctgattttctatagaccacatctgatctctgttttaggtgaaacttcgtgtagctcctattttgttgctccttgtgctgagaaaaatatcaaaaaaatcatacaaaaaagaaaaacaaaatcacttgtgattcctactagtggcctcgctagtacaatatttacggtactgccattctgctagttccatccgtccttcgcacttgtgtccagcaatatagtttcgtgttctgcactataattcaactttgcattattgtttgattgtgctaatcattgacttgagtgcagcctacccaaaactctacatatttctacgacgagaaggtttctgtttctccaggcaatcgctcatccaatctttcaccagttccacctgttggttgcagttcaccactgtggcttggtaagaacggataagaacttgataacagcactagtgtgagcgccttgtgagcag

SEQ ID NO: 540 - DNA, 1418 bp, Zea mays
  VARIATION (1390)..(1390): /replace="c" or "g" or "t"
  misc_feature (1390): /note="Nucleotide given in the sequence has no preference with respect to those in the annotation for said position"
  source: /note="Zea mays BAC clone full insert sequence contig bacm.pk010.m07.fis21"
atcgttaccttgattgggctaaccatggcaggattggaggttgatgatgcttctcgtaatatgccacactctcctcgcaccaagggtatcatacaacactttgtaaggctggtgaagacgcacacggaaggtcttgataatgacatgcaggtgacgaatgaaaagatggggcaattggaggccacacagatcgacacaaacaccaaacttgcaaatgtggaaatggcagttgctcatattgacaagagccttgtcgcactcttgaggcggtttgatgagatgcatgctaatatcaatggtgggcgtgatgagggcgccgaaggtaactgggatgactatgttgctgatactgaacaagatgaccaagaagcacctaatcgccggcgactacgtactaaccgtagaggtatgggtggttttcgccgacgtgaggtacatggtaatgatgatgcttttagtaaggttaaatttaaaatacctccttttgatggtaaatatgaccctgatgcttacattacttgggagattgcggttgatcaaaagtttgcatgccatgaatttcctgagaatgcgcgggttagagctgctactagtgagtttactgattttgcttctgtttggtggatagaacatggtaagaagaatcctaataacatgccacaaacttgggatgcgttgaaacgggtcatgcgggctagatttgttccttcttattatgcacgtgatatgttaaacaagttgcaacaattgagacagggtactaaaagtgtagaagaatattatcaggaattacaaatgggtatgctgcgttgtaacatagaggagtgtgaggaatctgctatggctagatttttgggcgggttaaatagggaaattcaggacatccttgcttataaagattatgctaatgtaacccgattgtttcatcttgcttgcaaagctgaaagggaagtgcagggacgacgtgctagtgcaaggtctaatgtttctgcaggaaaatctacaccatggcaacagcgcacgactacgtccatgaccggccatacaccagcaccaactccctcgccaagtcgaccagcacccccgccttcctccggcgacaaaccacgtgcatcttccacaaattcagcaaccaaatctgcccagaaaccagcaggtagtgcctcttcagtagcctccacgggtagaacaagagatgttctgtgttatcgatgcaagggctatggacacgtgcagcgtgattgtcctaatcagcgtgttttggtggtaaaagacgatggtgggtattcctctgctagtgatttggatgaagctacacttgctttgcttgcggctgatgatgcaggcactaaggaaccacccgaagaacagattggtatcaaggtatacagataccgtcgacctcccgttgtagttga

SEQ ID NO: 541 - DNA, 1378 bp, Zea mays
  VARIATION (955)..(955): /replace="c" or "g" or "t"
  misc_feature (955): /note="Nucleotide given in the sequence has no preference with respect to those in the annotation for said position"
  VARIATION (961)..(963): /replace="c" or "g" or "t"
  misc_feature (961)..(963): /note="Nucleotides given in the sequence have no preference with respect to those in the annotations for said positions"
  VARIATION (969)..(969): /replace="c" or "g" or "t"
  misc_feature (969): /note="Nucleotide given in the sequence has no preference with respect to those in the annotation for said position"
  source: /note="Zea mays BAC clone full insert sequence contig bacm.pk010.m07.fis22"
tttgcttaatacttgctgatcttcttgtgatcttcataatgtcttcttttgaggtgttgctttcctcattgccttagtccaagtcactttagcatcctctgaactacaatcataaacactagcaaacacgttagtccacatattatgttgatcatcaaacaccaaaacctattgagccaaatggcccggggtcccttttccttacaacgcagaaattgtactgggccaacacgctggaaaacgaattttcctatcgcgtatacctctgtgtccctccaatgaagagatgttccctttctagttcaaaagaaagcagtttcctatacggcttagctttgcaatgatggttaacaaagcacagggacagactattcctaatgttggcgtgtacttgcctgaagcagtgttctctcatggccaactatatgttgctctatctagagcgacaaccgattgaacataaagatccttgccatcccagccgtcgatgtgaagaagaggtcgaggaagggtgtaagaaagaaccccacattagattgtgggacatgcaccaagaacgtcgtctacaagaaggtactaacaaactagacccatggtaagtctgtcaaaacacaaacatataggagtactgcgtgtgattgcatcaagaataaataaagtttgttaaattatatttgtgattgttttggtgtctaaacaattgacacatagggtaatagcagtaagtcatgatatgtgtctggctgtaaggatatggttttgcattagaagtgtagacgatgggtggatcgagttcatggatgagcgctcctttggtcctttgttacatgttatatattaccttcattgcagtcttatcaccttcattgcagtcttactgcatggttttggtgtaccaaaattcttgttattctcgtcgtgttcggagagcacggcactaactgtctaccacttaagaacaaagagctaatggttgccccggcttatcgctgtgaccactgtgccatctaaagaaacacatcatagttattattggttctcaggaaccctgaacattttgtttctgtttacaagaaaggatgagtagttcactatgccatttgcactgaatgttttgttataattggcgcaaactagtctccgtgttttgggatatttccaagaagttcctgctatatattaataatgtattcgccaaaatctggtccttgaccgacattgcccctaacaagactggcaaaatatgggaaattcggtagacttgtggatttggtttcttcggcgtaaggtgcattaactacaatggatttaaaaggtttctaaaaaacccatagggcgtcttattgtggaaaggttattaaccactttttagggtgga

SEQ ID NO: 542 - DNA, 786 bp, Zea mays
  source: /note="Zea mays BAC clone full insert sequence contig bacm.pk010.m07.fis23"
cagatttgttcgtgattttagctccattgcagcgcctctacatgagcttacaaagaaagatgtgctgtttgcttggagtgattcgcaggaggtagcgttcagcactttgaaagataagttaacccaagttcccctcttgcaattgcctgattttaataaagtttttgagcttgaatgcgatgctagcggtattgggctaggtgctgttttgttacaagaaggaaaaccagttgcttattttagtgaaaaattaagcggtgctagtctgaaatattctacttatgataaggagctttacgctttagtgcgcactttgcatacatggcagcactatctttggcatcgtgagttcataattcattctgatcatgaggctttaaaacatattcgtacccaaacaaatctgaaccgtcgtcatgctaaatgggtcgaattcattgagtcctttccttacattattaaacacaagaacgggaaggacaatgatattgctgatgctttgtctcgtcgctataccttgctgtcacaattagattttaaaatctttggtttggacactgtaaaggatcaatatattgacgatgctgattttaaagatgctttcggccattgtattaatgggataccatggggcaaatttcacatacaggatgggttcctgtttcgcactaacaagctgtgtgttccagctagttcggttcgtcttttgttgttacaggaggcgcatggaggcggtctcatggggcattttggcgtctacaaaacgcatgaggtgttggctgccca

SEQ ID NO: 543 - DNA, 1457 bp, Zea mays
  source: /note="Zea mays BAC clone full insert sequence contig bacm.pk010.m07.fis24"
taaattacacacggcgaggtcgacggtatcgtttcccttgattcctcgactcaaacgtgtcattctctcccaagtatggtgttaaatctgcaatattaaaagaggaactgaccccaaaatctgcaggcaactgaactttatatgcattatcattatttttgtgaagtactttgatgggtctagcagctcttggttgtaatttagatttgcgcatatcagggaatctatctgatgtagctgaggtgcccgatcttttggcgagtagagataattccgatttggcggaagatgacccttgcgatccgactacgacgagcaagcccgaggcgccaatgcaatcgctgaaccaactctctgtggttaccgaccttgctgatgcgagatcgacctgatcacgaagatcgtttcctgtgcgcaatcgaagaacgaacaagaaaaatatgcgagcaatctaatctattactcgagggtggagttctgaatacacgaagacaacgcagatttgcacgtgttcgagagtagctaaggctaacgtaaaacaaaactcgaaaataaaggaggcgcagctcctggataaatagagggggcgcagcccctaggggcggccaaccctaggtcgtccactatgggccgcagttgggctggtcgtctattcttctgggccctcattcttcagtagcatgacgaagttaagatctctggcacgggcccgagtgattggcccagcttatgaaggaagtggcgcttgatgtggaggtgctgctggtgtagtcgtactcatagtgatgtcctcatcatcctccccttcttgaagtgaagtcgtcctcgacgacaactcctcatcctcggccatataaggtttcaaatctgcaacattaaaactagtggaaacaccaaattccgcaggcaggtcaaggatataagcattatcattaatctttgttagcaccttaaaaggaccagcagcacgaggccttaatttagaacggcgcaaagtaggaaaccgatcctttctcaagtgcaaccgaaccatatcacctggctcaaaagtaacatgttttcttcctttactaccagcaacctgattttttgcattagtagcagcaatgttctgtttcgtttgttcatgtatggtaatcatttgttcaacatgtgcagcagcatctacatgtggggcgttcgcagcattaagtgaaatcaaatcaataggtgccctagggatgtaacaataaacaatctgtaaagggcacatctttgtagaagaatgcgtggcatgattgtaagcaaattcaacatgaggcaagcaatcctcccaacgtctcaaattcttgtctaaaacagccctaagcatggtagataaagttctatttactacctcagtttgtccatcagtctgaggatgacaagtagtgctaaacaacaatttagttcccaatttattccaaagagatctccaa

SEQ ID NO: 544 - DNA, 1265 bp, Zea mays
  VARIATION (479)..(479): /replace="c" or "g" or "t"
  misc_feature (479): /note="Nucleotide given in the sequence has no preference with respect to those in the annotation for said position"
  VARIATION (487)..(487): /replace="c" or "g" or "t"
  misc_feature (487): /note="Nucleotide given in the sequence has no preference with respect to those in the annotation for said position"
  VARIATION (511)..(511): /replace="c" or "g" or "t"
  misc_feature (511): /note="Nucleotide given in the sequence has no preference with respect to those in the annotation for said position"
  VARIATION (1222)..(1222): /replace="c" or "g" or "t"
  misc_feature (1222): /note="Nucleotide given in the sequence has no preference with respect to those in the annotation for said position"
  VARIATION (1225)..(1225): /replace="c" or "g" or "t"
  misc_feature (1225): /note="Nucleotide given in the sequence has no preference with respect to those in the annotation for said position"
  VARIATION (1238)..(1238): /replace="c" or "g" or "t"
  misc_feature (1238): /note="Nucleotide given in the sequence has no preference with respect to those in the annotation for said position"
  source: /note="Zea mays BAC clone full insert sequence contig bacm.pk010.m07.fis25"
tcaagaaataaaggaggcgcagctcctggataaatagagaggtggcgcagcccctaggggcggccaaccctaggtcatccattatgggccgcagttgggctggtcgtctattcttccgggccttcgttctttaacagcataatgtagttcaattctcttgcacgggcccgagtcactggcccaggtggaaggggtggcgcctggactggggaagatggtgcctgggctggagaaggtgctgctggtgtagatgtgctcgtgttggtgttgatgtcctcatcatcctccccttcttgaactgaagtcgtcctcgacggcaactccttgtcttctcccgcatacggtttcaaatctgcaacattaaaactagtggaaacaccaaactccgcaggcaggtcgagggtataagcattatcattaatcttggttagtatcttaaaaggaccagcagcacgaggcatcaatttagaacgacgcaaagtaggaaaacgatcctttctcaaatgcaccaaaaccatatcaccaggttgaaaagtaactagtttccggcctttactaccagtaatctgatatttagcattagcagcagcaatgttttgttgagtttgttcatggagattaatcatttgttcaacatgtgcaagagcatctatgtgtggggcgtccgcagcatcaagtgaaaacaaagcaataggcgccctaggaatgtaaccataaacaatttgaaaagggcacatctttgtagaagaatgggttgcatgattataagcaaactcaacatgagggcatccaccgtgtcgtgtgctcctgccatagttagcgcaaacaccaaaacacgaaaaggagaaaaaccaacgacaacagggaaatggtggtgacaactcgctcaatggaatgatgttatcaagttcttatccgttcttaccaagccacagtggtgatttgcaaccaacaggtgtaaccggtgaaagattggatgagcgattgcctggagaaacagaatccttctcgtcgtagaaatatgtggagttttgggtaggctgcactcaagtcaaagattagcacgatcaaacaataatgcaaagttgaattatagtgcaaaacacgaaactatattgctgggcacaagtgcaaaggacagatggaactagcagaatggcagtaccgtaaatattatactagcgaggccaaaaatgcactagtacaaatcaggtaatcgatactacgcctgcatgtgatgacggtcccacattcgccgtatagta

SEQ ID NO: 545 - DNA, 654 bp, Zea mays
  source: /note="Zea mays BAC clone full insert sequence contig bacm.pk010.m07.fis26"
gtttaatcatgtgagtgtccgagccgttcatgaccgtgagcacggttgtcacaccccgggctttaagggacaaagccgggtgcatctcatacatgcgtcaaagaagacaacatatataataacagagtgtatagagataaatgtcacaataatcagagtacttattacatagcggaagacttacaaaaatataagataaatataacaggatctaaaatctatccttagcgccagaaagccaactgggagacaccacctagatcgaatcgaactcctcgttgtgtggcttctcttgaaccacctgttcttctcctgtgggggtgtgagacagcaagggtgagctcacacatgttcattgctcaacaagttgtggggaataatgtgtatgaactcaccaaaggtgggagttcatgtgatgtgtaaggctgatcaacaataggggttaaagttaagcattgcttttaataagttagtcaaaattttattagcagttactaaatgtaagtaaataccaaaccataataaataatagaacaaaattaataaataatctcatccaagtgcaaaatgacaaattgagttttaattccatagattactcatgtgagtgtccgagctgctcatgaccgtgagcacggctagtataccagtttt

SEQ ID NO: 546 - DNA, 1489 bp, Zea mays
  VARIATION (643)..(643): /replace="c" or "g" or "t"
  misc_feature (643): /note="Nucleotide given in the sequence has no preference with respect to those in the annotation for said position"
  VARIATION (1478)..(1478): /replace="c" or "g" or "t"
  misc_feature (1478): /note="Nucleotide given in the sequence has no preference with respect to those in the annotation for said position"
  source: /note="Zea mays BAC clone full insert sequence contig bacm.pk010.m07.fis27"
attgacttgggtagtgcaggcgttaactcggcagtttctggacacttagtgtctgatctctcgttgattcttgatccactagaaagtagacaaagagacctttccaacaagtgcttatttgcattaaacaaccttgggagctgaaagatatgccctcttaaacttgcacttgttgtagtttcgaaatcccctcaagtggagcagcttttattgccttgttgccttctcaaattctagatggttcacctcccaaacaccttagaataataaagtaatcacaaggtattagtacctcatttaaggaacgattagcttcaacaacaaggaacgagttcacctgataattaaatttacgtgcacggactcgtttcactggtccattattaaatggtgaaggaggtcgctggtgtggtgtattgatggcagtgatgtcctcatcaggagggatagcatttttgtggttgttgatcgattctccaaaatggctcatttcatactttgtcataagaccgatgatgctagcaatgttgctgaattgtttttagagagattattcgtttgcacggtattcccaatacaatagtctcggatcgtgatgctaagtttcttagtcatttttggagatctctgtggaataaattgagaactaaattgctatttagcaccacttgtcaccctcagactgatggtcaaactgaggtagttaatcgaactttgtctaccatgcttagggctgttttagacaaaaatttgaaacgttgggaggattgcttacctcatgttgagtttgcttataatcatgcaacacattcttctacaaagatgtgcccttttcaaattgtttatggttacattcctagggcgcctattgctttgttttcgcttgatgctgcggacgccccacacatagatgctcttgcacatgttgaacaaatgattaatctccatgaacaaactcaacaaaacattgctgctgctaatgctaaatatcagattactggtagtaaaggccggaaactagttacttttgaacctggtgatatggtttggttgcatttgagaaaggatcgttttcctgctttgcgccgttctaaattgatgcctcgtgctgctggtccttttaaggtactaaccaagattaatgataatgcttatatccttgacctgcctgcggagtttggtgtttccactagttttaatgttgcagatttgaaaccgtatgcgggagaagatgaggagttgccgtcgaggacgacttcagttcaagatggggaggatgatgcggacatcaacaccaacacgagcacatctacaccagcagcaccttctccagcccaggcgccaccccttccacctgggccagtgactcgggcccgtgcaagagaattgaactacatcatgttgttaaagaacgaaggcccggaagaatagacgaccagcccaattgcggcccataatggacgaccttgggttgccgaccccctagggg

SEQ ID NO: 547 - DNA, 1298 bp, Zea mays
  VARIATION (886)..(886): /replace="c" or "g" or "t"
  misc_feature (886): /note="Nucleotide given in the sequence has no preference with respect to those in the annotation for said position"
  source: /note="Zea mays BAC clone full insert sequence contig bacm.pk010.m07.fis28"
gcacatggaggcggtctcatggggcactttggcgtctacaagacacatgaggtgttggctgcccacttcttttggcctcagatgcgcgctgatgttgagcgccttgttgcacggtgcactacttgtcagaaagctaagtcacggttgaacaaccatagtttgtatatgcctttgcctgttcctacttccccttggattgatatttcgatggattttgttttgggattgcctagaactaagaaggggagggatagcatttttgtggttgttgatcgattctccaaaatggctcattttataccttgtcataagactgatgatgctagcaatgttgctgaattgttttttagagagattattcgtttgcacggtattcccaatacaatagtctcggatcgtgatgctaagtttctgagtcatttttggagatctctgtggaataaattgggaactaaattgctgtttagcaccacttgtcaccctcagactgatggtcaaactgaggtagttaatcgaactttgtctaccatgcttagggttgttttagacaaaaatttgaaacgttgggaggattgcttgcctcatgttgagtttgcttataatcatgcaacacattcttctacaaagatgtgcccttttcaaattgtttatggttacattcctagggcgcctattgctttgttttcgcttgatgctgcggacgccccacacatagatgctcttgcacatgttgaacaaatgattaacctccatgaacaaactcaacaaaacattgttgctgctaatgctaaatatcagattattggtagtaaaggccagaaactagttacttttgaacctggtgatatggtttggttgcatttgagaaaggatcgttttcctactatgcgccgttctaaattgatgcctcgtgttgctggtccttttaagatactaaccaagattaatgctaatgcttatatccttgacctacctgcgaagtttggtgtttccactaattttaatgttgcagatttgaaaccgtatgcgggagaagatgaggagttgccgtcgaggacgacttcagttcaagaaggggaggatgaggaggacatcaacaccaacatgagtacatctacaccagcagcaccttctccagcccaggcaccatcttccctagtccaggcgccacccttccacttgggccagtgactcaggctcgtgcaagagaattgaactacatcatgttgttaaagaacgaaggcccagaagattagaagatggtccaataggaaggcccggatggggcgcctaggtaa

SEQ ID NO: 548 - DNA, 734 bp, Zea mays
  source: /note="Zea mays BAC clone full insert sequence contig bacm.pk010.m07.fis29"
cagtgtcaccgccgtattcctgctccatctttgtggtcaatgcatcaaggcgtgccaggatggtgtcgagtgtggtgcgagtcgccgtttgagcaaggtcaagttggttgaaacgctcggtcgtcgaagtgatcgttgaatcaagccgttcatgcatcgtcctaatgtcagcagcaagtccatcaacttgtccccttacttcctgcaactgggcatccaccatgtcgtgtgctcctgccatagttagcgcaaacaccaaaaggagaaaaaccaacgacaaaaacaggggtgtactgctcacaaggcgctcacactagtgctgttatcaagttcttatccgttcttaccaagccacagtggtgaactgcaatcaacaggtggaaccggtgaaagattggatgagcgattgcgtggagaaacagaaacctgctcgtcgtagaaatatgtggagttgtgggtaggctgcactcaagtcaaggattagcacgatcaaacaataatgcaaagttgaattatagtgcaaaacacgaaactatattgctggccacaggtgcaaaggatggatggatggaaatagcagaatggcagtaacgtaaatattgtactagtgatgccaaaaaggcactagtagaaatcacaggtgattttgtttttcttttttgtatgatttttttgatatttttctcagcacaagaagcaacaagataggagctacacgaagtttcacctaaaac

SEQ ID NO: 549 - DNA, 1465 bp, Zea mays
  source: /note="Zea mays BAC clone full insert sequence contig bacm.pk010.m07.fis30"
catctacatgtggggcgttcgcagcattaagtgaaatcaaatcaataggtgccctaggaatgtaaccataaacaatctggaaagggcacatctttgtagaagaatgcgtggcatgattgtaagcaaattcaacatgaggtaagcaatcctcccaacgtctcaaattcttgtctaaaacagccctaagcatggtagataaagttctatttactacctcagtttgtccatcagtctgagggtgacaagtagtgctaaacaacaatttagttcccaatttattccaaagagatctccaaaaatggcttagaaacttagcatcgcgatcagagactattgtttttggaataccatgtaaacgaataatttctctaaagaacaattcagcaacaatgctagcatcatcagttttatgacaaggtataaagtgagccattttagagaatctatcaacaaccacaaaaatactatccctccccttcttagttctaggcaagcccaaaacaaagtccatagaaatatcaagccaaggagaagaagggacaggcaaaggcatatacaaaccatggttgttcaaccgtgacttagctttctgacaagtagtgcagcgtgcaacaaggcgctcaacatcagcgcgcatccgaggccaaaagaagtgggcagccaacacctcatgcgttttgtagacgccaaaatgccccatgagaccgcctccatgcgcctcctgtaacaacaaaagacgaaccgaactagctggaacacacagcttgttagcgcgaaacaggaacccatcctgtatgtgaaatttgccccatggtatcccattaatacaatggccgaaagcatctttaaaatcagcatcgtcaacatattgatccttcacagtgtccaaaccaaagattttaaaatctaattgtgacagcatggtatagcgacgagacaaagcatcagcaataacattgtccttcccgttcttgtgtttaataatgtaaggaaaggactcaatgaattcgacccatttagcatgacgacggttcagatttgtttgggtacgaatatgttttaaagcctcatgatcagaatgaattatgaactcacgatgccaaagatagtgctgccatgtatgcaaagtgcgcactaaagcgtaaagctccttatcataagtagaatatttcagactagcaccgcttaatttttcactaaaataagcaactggttttccttcttgtaacaaaacagcacctagcccaataccgctagcatcgcattcaagctcaaaaactttattaaaatcaggcaattgcaagaggggagcttgggttaacttatctttcaaagtggtgaacgctacctcctgcgaatcactccaagcaaacggcacatctttctttgtaagctcatgtagaggcgctgcaatggagctaaaatcacgaacaaatctgcggtagaaaccagcaagatcaggaaa

SEQ ID NO: 550 - DNA, 1519 bp, Zea mays
  source: /note="Zea mays BAC clone full insert sequence contig bacm.pk010.m07.fis32"
acgctgctatggcgcgttttcgtggtggtttgaacagagaaatcagggatatacttgattataaggattattttgatataaccacattgtttgaatatgcttgcaaagctgaacgtgaagtgcagggacgacgatcaaagacatatactaactcttttgcaggtcagggtccaacacacagctcaactccttccagccctgcaccttctacgcctagcactacatcgcgcatagggacgaccaagccagtggcgccccctgcaaaaggcgccgcttcttccacaggatgtacacgggatattcagtgccatcgttgcagagggtttgggcacatgatttgggactgcccaaacaagcgtaccttgcttatacatgacaatggtgagtactcttcagccagtgattctgaggaaactagtcatgctatgattgccactaaccatgcagcaaatgaggaagtccacgttgatcccatcgacgccgataggtatgagagtcttgttgtgcagcgtgttctcagcacacaggttgcccaggccgaaaaaaatcagcgacacactctattccataccaagggcgtcgtgcacgaacggtcgattcgcatcatcatcgatagtggcagctgcaacaatttggcaagtacaacgttggtagagaaattatccttgcccactcgcacacatccacatccgtatcacattcaatggcttaatgatggtggtaaaataaaggtaacacgttcggtacgtgtccccttttcgctgggttcttattctgattatgctgattgcgatgttattcctatggaagcatgctctttgttattaggtcgaccttggcaatatgatactgatagtttacatcatggtcgttcaaatcattattctttcatgtttaaaggccagaaaataattataaatcccatgacccctgaccaaattttgaaagatgatcttactagggctgctaaaactgcacaacaagtcaaatcgacatcagccgcacctattaaatctgaaatcaagttgcactctcctgttttacttgctacacgtgctgattttgatgatctccatgaagctcatatgccctgttatgcacttgtatgctcgcgaatgcttgttccgcttgttgatgcaccgtctttggatataccccctgctgttgttaaccttttgcaggagtatgctgatgtttatcctacggacttaccaccgggtcttcctcccctccgtggcattgagcatcagatcgatctcatccctggcgcttctcttccgaaccgcgccccgtaccgtacaaatccagatgagacgaaggagatccagcgccaggtgcagacgctgcttgataagggttacattcgtgagtctcttagcccttgctcggttcctgttttactcgtcccaaagaaagatgggtcatggcgtatgtgcgtagattgtcgtgctattaataacatcacagttcgttatcgatatcctattccacgccttgatgatatgctagatgagcttag

SEQ ID NO: 551 - DNA, 1746 bp, Zea mays
  source: /note="Zea mays BAC clone full insert sequence contig bacm.pk010.m07.fis33"
ctgggacatctatgccaatacaagtaccaatttctggtcccattactcgtgctcgtgctcgtcaactcaaccatcaggtgattacactcttgagttcatgtccatcatatttagaccatggagacccttgcactcttgttttgcttaggaaccagggagaagaccgaaatggaaaaggatttgaacatgctggattcggactgcagaagaacaccaacttgtgacggtcaccacggtcagatgcgggctcggattggaatgttcaagcacaacatggaaagcttatcaagtctactttcatatggatccggaattatagtcatatctgttctgaggccgccgtaatcattgttttcttaccgagacatttcctgccttttctgcccatggtgctgcgtcaccctattttggcccaatgggtcgtgtatcaagttaggtccattagggacgcatcctagggttgcagcacgaccccaatacccttgtggtcgtcctcccatgtttataaaccccctagccgccaccaagaacagcgggttttgtttagatcaagtttagctctcgctacttgcttgtaagcgcgcgtgctggttcagccgcccgtcttcttgtcttcggaaccccaccatattggagtttgattttgaaacctacatttagatctggtaattcagtacttgttctacttgttcttgctagttcttcgattgcttgcaggacgagtgccctagtggccagggtgtcacgctccacaagatcgtgacaaccataggaggtggtgtatcggttgctaaggcgcagcgtctttggaaggctgtagtcgggccgtgaacgtcgtctccttccccaatcgagttattccacaccctctcatcgaaagatcgggcaatcacccaacgggtgcacatcagttggtatcaaagcaaggtttatcggtgagagatttacttttcttcgctgttttcttatctcctatagtccagaaaaagccaaaaaaatagtagattagttttaccgcaatcctataaaccattgagcatttactagtactacttagttagggcttgttgagtttttggttgcatcggttgtgtcgagttgctggtcttagtttattcctttagagttttgagttctaccacgttttggtcaccacgagatccaccatcaccaaaaacatctctggttcgtttttgccaccacggatacatatcatatccgatttggaagtttaaatacaatctagaaagcttatcttatcttctttccaacggatctgaccttatctcaaaattcgttctgagcgctccgcaatcatcgtagagatttctggactttctatattaacaagatttgttaaatctgatttaaaggggctgttagcaatatctttattgtttgggttgtcatagtgaaaaaagggtttaagcccctgcaaaaaaaaaacagaagaagaagaaggaaaaaaaagaatagaaaaaaaaggaaaagaagaagaagggggctgaatctctaaatctgttgtttctctttgtgctgtgctagttgttctttttcagtgactacctttgtgcctaggctcacgtctctaacctggtttagcctaggaccagcacagtaccaccgttgaacgattattcagcttgcttttgtaactaacgtggtactagtgtattccttgcttcagcccacctacaactctacatatttcgactacagtttgacaggtcgtgttgctgcggcacc

SEQ ID NO: 552 - DNA, 1789 bp, Zea mays
  VARIATION (1757)..(1757): /replace="c" or "g" or "t"
  misc_feature (1757): /note="Nucleotide given in the sequence has no preference with respect to those in the annotation for said position"
  VARIATION (1766)..(1766): /replace="c" or "g" or "t"
  misc_feature (1766): /note="Nucleotide given in the sequence has no preference with respect to those in the annotation for said position"
  VARIATION (1778)..(1779): /replace="c" or "g" or "t"
  misc_feature (1778)..(1779): /note="Nucleotides given in the sequence have no preference with respect to those in the annotations for said positions"
  source: /note="Zea mays BAC clone full insert sequence contig bacm.pk010.m07.fis34"
tcaaatcacaaggggaggtcgacggtatcgatttgcctgatgttatcttttttttctgtttttttgacgtaaccgaaggagaaaaacaaggaagcgatgttgactcggtttgtggcgtgatcaaaagggagatggtggcggcgctagggtttgaatggtggaagaacacaatgcaaccagcaacaaatgacgcgaaagcacacaaattcaacaatgcagattattgaaagaaagtgcgaggctcaaaagggtgctgggataagatctaacctgaatttttatgtggttttgtggactgtaggaaaaaaaacgctcgataaactcaccgatcaacctggaaatctgataccaattgatgaagctgaagtgcccgatctttcggcgagtagagataattccgatttggcggaagatgacccttgcgatccgactacgacgagcaagcccgaggcgccaatgcaatcgctgaaccaactccctgtggttaccgaccttgctgatgcgagatcggcctgatcacgaagatcgtttcctgtgcgcaatcgaagaacgaacaagaacaagatgcgagcaatctaatctattactcgagggtggagttctgaatacacgaagacagcgcagatttgcgcgtgttcgagagtagctaaggctaacgtaaaacaaaactccgaaataaaggaggcgcagctcctgaataaatagagagggggcgcagcccctaggggcggccaaccctaggtcgtccattatgggccgcaattgggctggtcgtctattcttccgggccttcgttctttaacaacatgatgtagttcaattctcttgcacgggcccgagtcactggcccaggtggaaggggtggcgcctgggctggagaaggtgctgctggtgtagatgtgctcgtgttggtgttgatgtccgcatcagtagagataattccgatttggcggaagatgacccttgcgatccgactacgacgagcaagcccgaggcgccaatgtaatcgctgaaccaactccctgtggttaccgaccttgctgatgcgagatcgacctgatcacgaagatcgtttcctgtgcgcaatcgaagaacgaacaagaaaaatatgcgagcaatctaatctattactcgagggtggagttctgaatacacgaagacaacgcagatttgcacgtgttcgagagtagctaaggctaacgtaaaacaaaactcgaaaataaaggaggcgcagctcctggataaatagagggggcgcagcccctaggggcggccaaccctaggtcgtccactatgggccgcagttgggctggtcgtctattcttctgggccctcattcttcagtagcatgacgaagttaagatctctggcacgggcccgagtgattggcccagcttatgaaggaagtggcgcttgatgtggaggtgctgctggtgtagtcgtactcatagtgatgtcctcatcactatctttccttaaatgcacccatactaaatcaccaggttcaaaggtaatatgctgtctacccttgctacctgcttcttcatacttagcattcatggctttaatatttgctttagtttgttcatgcagctttataatcagctcagcacgacgagaagcatcaaaattcgttatttcagaatgtgggatggcgataagatcaataggagcacgagggacaaaaccatacacaattttaaaagggcatagtttagttgtagaatgctgagaacgccccttttttgtaatcgataccgtcgacatgcaggggtaaaacgggccccct

SEQ ID NO: 553 - DNA, 2562 bp, Zea mays
  source: /note="Zea mays BAC clone full insert sequence contig bacm.pk010.m07.fis35"
gcgccacagatttgttccttcttattatgctcgtgatttgcttaacaaaatgcagcgttttcaacaaggttcacagtctgttgaggaatattaccaggagttacaaaagggtatgcttcgttgtggtttggttgagtcggatgacgctgctatggcgcgttttcgtggtggtttgaacagggaaattcaggatatacttgattataaggattattttgatataaccacattgtttgaatatgcttgcaaagctgaacgtgaagtgcagggacgacgatcaaagacatatactaactcttttgcaggccggggtccaacacacagctcaactccttccagccctgtaccttctacgcctagcactacatcgcgcacagggacgaccaagccagtggcaccccctgccaaaggcgccgcttcttccacaggacgtacatgggatattcagtgccatcgttgcagagggtttgggcatatgattcgggactgcccaaacaagcgtaccttgcttatacgtgacaatggtgagtactcttcagctagtgattctgaggaaactagtcatgctatgattgccactaaccatgcagcaaatgaggaagtccacgttgatcccatcgacgccgataggtatgagagtcttgttgtgcagcgtgttctcagcacacaggttgcccaggccgaaaaaaatcagcgacacactctattccataccaagggcgtcgtgcacgaacggtcgattcgcatcatcatcgatagtggcagctgcaacaatttggcaagtacagcgttggtagagaaattatccttgcccactcgcacacatccacatccgtatcacattcaatggcttaatgatggtggtaaaataaaggtaacacgttcggtacgtgtccccttttcgctgggttcttattctgattatgctgattgcgatgttattcctatggaagcatgctctttgttattgggtcgaccttggcaatatgatactgatagtttacatcatggtcgttcaaatcattattctttcatgtttaaaggccagaaaataattatacatccaatgacccctgaccaaattttgaaagatgatcttactagggctgctaaaactgcacaacaagtcaaatcgacatcagccgcacctactaaatctgaaatcaagttgcactctcatgttttacttgctacacgtgctgattttgatgatctccatgaagctcatatgccctgttatgcacttgtatgctcgcgcatgcttgttccgcttgatgatgcaccgtctttggatataccccctgctgttgttaaccttttgcaggagtatgctgatgtttatcctacggacttaccaccgggtcttcctcccctccgtggcattgagcatcagatcgatctcatccccggcgcttctcttccgaaccgcgccccgtaccgtacaaatccagaggagacgaaggagatccagcgccaggtgcagacgctgcttgataagggttacattcgtgagtctcttagcccttgctcggttcctgttttactcgtcccaaagaaagatgggtcatggcgtatgtgcgtagattgtcgtgctattaataacatcacagttcgttatcgatatcctattccacgccttgatgatatgctagatgagcttagtggtgccgttattttctctaaggttgatttgcgtagcggttaccatcagattagaatgaaactcggtgatgaatggaaaacggcttttaaaacgaaatttggtttatatgaatggttggttatgccatttggattgactaatgctcccagcaccttttatgcgtttaatgaacgaagttctacgggccttcataggtttgtttgttgttgtttatttcgatgatatccttatttacagcaagtctatagaggagcatttagaacatttgcgtgctgtttttgacgctttgcgtgctgctcgcttgtttggtaacatggaaaagtgcacattttgcacgcaacgtgtctcgtttcttggttatgtggttactccgcagggcattgaggtggatagcagcaagattgctgccattcgggagtggcctacaccgacgacggtcacacaaattcggagctttcttggacttgccggtttctaccgcagatttgttcgtgattttagctccattgcagcgcctctacatgagcttacaaagaaagatgtgccgtttgcttggagtgattcgcaggaggtagcgttcagcactttgaaagataagttaacccaagctcccctattgcaattgcctgattttaataaagtgtttgagcttgaatgcgatgctagcggtattgggctaggtgctgttttgttacaagaaggaaaaccagttgcttattttagtgaaaaattaagcggtgctagtctgaaatattctacttatgataaggagctttacgctttagtgcgcactttgcatacatggcagcactatctttggcatcgtgagtttataatccattctgatcatgaggctttaaaacatattcgtacccaaacaaatctgaaccgtcgtcatg

SEQ ID NO: 554 - DNA, 1444 bp, Zea mays
  source: /note="Zea mays BAC clone full insert sequence contig bacm.pk010.m07.fis36"
gatcagctccttaacactcagcaacagcttgctgaggctaacgagcacctggacatgcatcaccaagagatccaggaccaggaggacgacgaggacgtcgacattgagggaggagatgagcctgcctccagtgtggacactgctggctcgggaagaccaccttcccccgagtccagtgttgcttcgttcgctcgctaggtgtccaaggtaggcttagaagtcggacagtcggactcctcgcagctagcttagcttttgcacccttggggtactaggctaggtagggttgagtcattttagaacaaattgatgtaatcatgttaaactctcttgggggcttgtttgaggaatgctattatcagtttaatttggaaggaagaatttatgcctcttaaagaatcccttttgttgaagttagatctttcatgctgtttttaacttttccccgtgttgaaatcttgaaattggaactgtggtgttaagtaagcatgtggtttttcagatggctgggaggcagcgtcgtggccagaacgagcgcgttccaccaccacccccacctcccactctgcaggagctcatggctcagcagaatgagatcctgaggcagctggctcaacgtcagccaccaccccagcattatggtggtggagaccaccagcgtcaccccgcggtggccacctatcaggaattcctcagcacccagcctccactgttcacaagggcggaagacccacttgacgcagatgtatggctgcgagtggtggaatccaaattcccactgctccatggagtttgctcagaggtcaccaaagtcaggttcgccacccagcagcttcgcggacctgcaaggacttggtgggatcattttcttgctatgcagccagaggaccgagaggtggagtggagggagtttaaggcagcttttagaggacaccatataccagccgggatcatggacaggaaactcaatgagttcttggcactcactcagggcaacaggacagtgttgcagtatgcccaggcctttaatgacttgtgccagtatgcgggatatcatgcggatacagatgagaagaagagggacagattcagaagggggctcagcactaagctccgggatcgtctcaacgccgtcagggccaacagctacaatgagttagtcaacatggccatctcccaagaggactgcattaccgctaggcaggcagagaagaaaaggaagacccctgtggcaggaccctcagctcagccacagcgtttccggattgtgtccgacccccagggaaggggaccccagcagcagcaagggcgatgggtaattcgacctcagcagcagcagcagcaggcacccaaccgcaatcaatttccagcacagcggaatagtcagcagcagcagtaccgccaagccaatgacaacaggtgcttcacttgtggcaacactggg

SEQ ID NO: 555 - DNA, 1187 bp, Zea mays
  VARIATION (1175)..(1175): /replace="c" or "g" or "t"
  misc_feature (1175): /note="Nucleotide given in the sequence has no preference with respect to those in the annotation for said position"
  source: /note="Zea mays BAC clone full insert sequence contig bacm.pk010.m07.fis37"
ggagaaaaataaggaagtggcgttgactcggtttatggcgtgatcaaacgaaatatggtggcggcacgctagggtttgaatggtggaataacacaatgcaaccagcaacaaatgatgtgaaagcacacaaattcaacgatgtagattattgaaagaaagtgcgaggctcaaaagggtgctgggataaggtctaacctaaatttttatgtggttttgtggactataggagaaaaaacactcgataaactcaccgatcaacctggaaatctgataccacttgatagagctggagtgcccgatctttcggttagtggagataattccgatttggttgaagtagaccctcacgatccgactacgacgagcgaacccgaagcgccaatgcaatcgctgaaccaactcccaatggttactgaccttgctgatgcgagatcgacctgatcacgaagatcgtttcctgtgcgcaatcgaagaacgaacaagaaaaagatgcgagcaatcttaatatcactcgaggtggagttctgaatcacagaggacagcacgtatttgtgcgtgttctggggtagctaaagctagatgtaaaacaaaactcaagttctaaatgaaacaggattctgactaaatagaggagaggcgtgaacagtagggccggcgctacagtaccacggttactgttcacgacttccctaggcgccccatccgggccttcctgttgggccatcttctaatcttctgggccttcgttctttaacagcatgatgtagttcaattctcttgcacgggcccgagtcactggcccaggtggaaggggtggcgcctggactggggaagatggtgcctgggctagagaaggtgctgctggtgtagatgtactcgtgttggtgttgatgtcctcatcagatactttgacatttgtttgcaagtagtagtacttacagttgttctttgagcatctctactttagatcctgtattttgattgttaacttttaataaatgaatttatgatgaatctgtagaatctacttgatgggtcaatcagcaggagcacatatcgcggcctgcgctctcttagagcaagcaattaaggaatctaagggagagaatacctattggaatgtggctcaaataaaagcatattttggtttatcaggaaaatcgataccgtcgccatccgtttttgaa

SEQ ID NO: 556 - DNA, 1651 bp, Zea mays
  source: /note="Zea mays BAC clone full insert sequence contig bacm.pk010.m07.fis38"
caaagcacgagtttttgccaatggaaccatttcttcgtttttcgcaacaagcatgcccaatccactactttaggtccaaaactcatgtttggggtggtttcacgcaatttcgttgccgcacgtcacacattccaaaaatgggtgtcggggtgcaaacaaagcacaagtttttgccactggaactatttcttcgtttttcacaacgaacatgcccaatccactactttaggtccaaaacacatgtttggggtggtttcgcgcaatttcgttgccgcacgtcacccattccgaagacgggtgtcggggtgcatacaagcacgagtttttgccaccggaaccatttcttcgtttttcgcaacgaacatgcccaatccactactttaggtccaaaacacatgtttatggtggtttcgcgcaatttcattgcctcacgtcacccattccgaaaacaggcgtcggagtgcatacaaacacgagtttttgccaccggaaccatttcttcgtttttcgcaatgaacatgcccaatccacttctttagctccaaaactcatgtttggggtggtttcgctcaatttcgttgccacacgtcccccattccgaaaacgggtgtcggggtgcatacaagcacgagtttttgccaccggaaccatttcatcgtttttcgcaatgaacatggccaatccactactttaggtccaaaactcatgtttggggtggtttcgcgcaatttcgttgccgcacgtcactcattccgaaaacgggtgtcggggtgcatacaaagcaggagtttttgccaccggaaccatttcttagtttttcccaacgaacatgcccaatccactactttaggtccaaaacacatgtttgggggggtggtttcgcacaatttcgttgccgcacgtcaccattccgaaaacgggtgtcgggttgcatacaagcacgagtttttgccacagaaaccatttcttcgtttttcgcaacgaacatgtccaattcactactttaggaccaaaacacatgtttggagtggtttcgcgtaatttcattgccgcacgtcacccaatccaaaaatcggtgtcggggtgcatacaaagcacgagtttttgccactggaaccatttcttcgtttttcgcagcgaacatgcccaatccactactttaggtttaaaactcatgtttggggtggtttcacgcaatttcgttgccgcacgtcacacattccgaaaatgggtgtcgggggtgcaaacaaagcacgagtttttgccactggaaccatttcttcgtttttcagaacgaacatgcccaatccactactttaggtccaaaacacatgtttggggtggtttcacgcaatttcgttgccgcacgtcacccattccgaagacgggtgtcggggtgcatacaagcacgagtttttgccaccggaaccatttcttcgtttttcgcaacgaacatgcccaatccactactttgggtcccaaactcatgtttggggtggtttcgcgcaatttcgttgtcgcacgtcacgcattccgaaaacgggtgtggtgcatacaaagtacgagtttttgccaccggaaccatttctttgtttttcgcaacgaacatgcatcaagcgaaacgataccgtcgacctcccctgtggattaa

SEQ ID NO: 557 - DNA, 1442 bp, Zea mays
  source: /note="Zea mays BAC clone full insert sequence contig bacm.pk010.m07.fis39"
aggctatgttgtgacaccgcagggaattgaagttgatcaggctaaggtggaggccatagatagctggccagtccctaccacggtcacgcaagtccgaagctttctcgggcttgcggggttctatcgtcgatttgtgaaagatttcagcaccatcgcagggccattgcacgagcttactaagaagggtgctccattttcttggggcaaggcgcaagaggttgcatttgaaacattgaaggataggttaactcatacaccccttctccaattacctgatttcagtaagacttttgaattggaatgtgatgctagtggtattggtttgggtggtgtcttgttgcaagaagggaagcctattgcttattttagtgagaaactgaatggacccagtctgaactattccacttatgataaagaattatatgccttagttcgaactttggaaacatggcaacactacttatggcctaaagaatttgttatacattctcatcatgaatctttaaagcatctaaggagccaaacaaatctgaaccgtaggcatgccaagtgggtcgaatttattgaatcttttccctatgtgatcaaacataagaaaggaaaagacaatgtcattgcagatgccttgtctcgccgttataccatgctgtctcaacttgattttaagatttttggcttggaaacaattaaacaacaatatgttttcgatgctgatttcaaagatgtgctattacattgtaaagaaggaaggacatggaacaaatttgttctcactgatggctttgtgtttcggactaacaaattatgcattccagctggttccgtgcgtatattattattacaggaagcacatggcagtgggttgatgggacactttggtgtgaagaagacagaagacatcctggccagccatttcttttggccgaagatgagaagagacgtggagcggtttgttgcttgctgcactacatgtcaaaaagctaagtctcgccttaattcacatggtttatacatgcctctcccagttcctagtgcaccatgggaggatatttctatggactttgttttacggctatctagaacaaagaaggggaggaatagtatttttgttgttgtggacagattttcaaaaatggcacactttataccatgtcacaaaactgatgacgctacccatgttgctgatttgttctttcgtgaagttgttcgtttgcatggggttccaaacactattatgtccgatcgggataccaaatttcttagtcatttttggaaaacgttatgggctaagttaggaactaaattgctcttttctactacttgtcaccctcaaaccgatggacaaaccgaagtcgtaaaccatagtttatctaccatgcttagggctgttctgaaacataacatcaaattgtgggaagaatgtttgcctcacattgaatttg

SEQ ID NO: 558 - DNA, 1897 bp, Zea mays
  VARIATION (1887)..(1887): /replace="c" or "g" or "t"
  misc_feature (1887): /note="Nucleotide given in the sequence has no preference with respect to those in the annotation for said position"
  source: /note="Zea mays BAC clone full insert sequence contig bacm.pk010.m07.fis40"
tgatgttgagcgccttgttgcacgctgcactacttgtcagaaagctaagtcacggttgacaacccatggtttgtatatgcctttgcctgtcccttcttctccttggcttgatatctctatggactttgttttgggcttgcctagaactaagaaggggagggatagtatttttgtggttgttgatagattctctaaaatggctcactttataccttgtcataaaactgatgatgctagcattgttgttgaattgttctttagagaaattattcgtttacatggtattccaaaaacaatagtctctgatcgcgatgctaagtttctaagccatttttggagatctctttggaataaattgggaactaaattgttgtttagcactacttgtcaccctcagactgatggacaaactgaggtagtaaatagaactttatctaccatgcttagggctgttttagacaagaatttgagacgttgggaggattgcttgcctcatgttgaatttgcttacaatcatgccacgcattcttctacaaagatgtgccctttccagattgtttatggttacatccctagggcacctattgatttgatttcgcttaatgctgcaaacgccccacatgtagatgctgctgcacatgttgaacaaatgattaccatacatgaacaaacgaaacagaacattgctgctactaatgcaaaaaatcaggttgctggtagtaaaggaagaaaacatgttacttttgagccaggtgatatggtttggttgcacttgagaaaggatcggtttcctactttgcgccgttctaaattaatgcctcgtgctgctggtccttttaaggtgctaacaaagattaatgataatgcttatatccttgacctgcctgcagaatttggtgtttccactagttttaatgttgcagatttgaaaccatatatggccgaggatgaggagttgtcgtcgaggacgacttcacttcaagaaggggaggatgatgagcacatcactatgagtacgactacaccagcagcacctccacatcaagcgccacttccttcattagctgggccaatcactcgggcccgtgccagagatcttaacttcgtcatgctactgaagaatgagggcccagaaaaatagacgaccagcccaactgcggcccatagtggacgacctagggttggccgcccctaggggctgcgccccctctatttatccaggagctgcgcctcctttattctcgagttttgttttacgttagccttagctactctcgaacgcgcgcaaatctgcgctgtcttcgtgtattcagaactccaccctcgagtaatagattagattgctcgcatctttttcttgttcgttcttcgattgtgcacaggaaacgatcttcgtgatcaggccgatctcgcatcagcaaggtcggtaaccacagggagttggttcagcgattgcattggcgcctcgggcttgctcgtcgtagtcggatcgcaagggtcatcatccgccaaatcggaattatctctactcgccgaaagatcgggcacctcagcttcatcaagcttccacatcacccaacctaggacgcagaccggccacgtcaacaggaggcgccatcatcaccctaccccgagctgactcgggccgcagggaacaagaccggcgtcccatctggctcgctccgccagacaggcaatgatggcgtcccgcatactctgtgacgacggcggctctcagcccccttacggaagcaagaggacgtcagcaaggactcaatcgctccgacagttgtccctccgccaggctccatcgctccctcgacgggcacgacatcacaccagctgggtgccaaaatctctccggctgccacaacggcgtgtacttaaggcgctagct

SEQ ID NO: 559 - DNA, 1845 bp, Zea mays
  source: /note="Zea mays BAC clone full insert sequence contig bacm.pk010.m07.fis41"
tttatggttacattcctagggcgcctattgctttgttttcgcttgatgctgcggacgccccacacatagatgctattgcacatgttgaacaaatgattaacctccatgaacaaactcaacaaaacattgctgctactaatgcaaaaaatcaggttgctggtagtaaaggaagaaaacttgttacttttgagccaggtgatatggtttggttgcacttgagaaaggatcagtttcctactttgcgccgttctaaattaatgcctcgtgctgctggtcctattaaggtgctaacaaagattaataataatgcttatatccttgacctgcctgcggaatttggtgtttccactagttttaatgttgcagatttgaaaccatatatggccgaggatgaggagttgccgtcgaggacgacttcacttcaagaaggagaggatgatgaggacatcactatgagtacgactacaccagcagcacctccacatcaagcgccacttccttcattagctgggccaatcactcgggcccgtgccagagatcttaacttcgtcatgctactgaagaatgaaggtccagaagaatagacgaccagcccaactgcggcccatagtggacgacctagggttggccgcccctaggggctgtgccccctctctctatttatataggagttgcgcctcctttgttttttcgagttttgttttacatctagctttagctaccccagaacacgcacaaatacgtgttgtcctctgtgattcagaactccacctcgagtgatattaagattgctcgcatctttttcttgttcgttcttcgattgcgcacaggaaaggatcttcgtgatcaggccgatctcgcatcagcaaggtcggtaaccattggaagttggttcagcgattgcattggcgcttcgggatcgctcgtcgtagtcggatcgtgagggtctacttccaccaaatcggaattatctccactcaccgaaagatcgggcactccagttctatcacattgccgcacgtcacccattccgaaaacgggtgtcgaagtgcatacaataacgaatttttgccaccggaaccatttcttcgtttttcgcaacgaacatgcccaatccactactttaggtccaaaacacatgtttggggtggtttcgcgcaattttattgccgcacgtcaccaattccgaaaacgggtgtcggggtgcatacaagcacgagtttttgccaccgtaaccatttcttcgttttcgcaacgaacatacccaatccactactttaggtccaaaacacatgtgatgaggacatcaacaccaacacgagcacatctacaccagtagcaccttctccagcccaggcaccatctaccccagtccaggcgccaccccttccacctgggccagtgactcgggcctgatgcggacatcaacaccaacacgagcacatctacaccagcagcaccttctccagcccaggcgccaccccttccacctgggccagtgactcgggcccgtgcaagagaattgaactacatcatgttgttaaagaacgaaggcccggaagaatagacgaccagcccaattgcggcccataatggacgacctagggttggccgcccctaggggctgcgccccctctctatttattcaggagctgcgcctcctttattttgggagttttgttttacgttagccttagctactctcgaacacgcgcaaatctgcgctgtcttcgtgtattcagaactccaccctcgagtaatagattagattgctcgcatctttttcttgttcgttcttcgattgcgcacaagaaacgatcttcgtgatcaggccgatctcgcatc

SEQ ID NO: 560 - DNA, 2292 bp, Zea mays
  source: /note="Zea mays BAC clone full insert sequence contig bacm.pk010.m07.fis42"
acgatagcttaaaaagggccaaaactcatgtttggggtggtttcgcgcaatttcattgccgcacgtcactcattccgaaaacgggtgtcggggtgcatacaagcacgagtttttgccaccggaaccatttcttcgttttttcgcaaccaacatgcccaatccactactttaggtccaaaactcatgtttggggtggtttcgcgcaatttcgatgacgcacgtcactcattccgaaaatgggtgtcggagtgcatacaaagcacgagtttttgccaccggaaccatattttcgtttttcccaacgaacatgcccaatccactactttaagtccaaaacgcatgtttggggtggtttcgcgcgatttcattgccgcacgtcatccattccgaaaacgggtgtcggggtgcatacaagcacgagtttttgccaccggaaccatttcttcgttttttgcaaaaacatgcccaatccactactttaggtccaaaactcatatttggggtggtttcgagtgatttcattgccgcacgtcacccattccgaaaacgggtgtcgggggagcatacaagcacgagtttttgccacaagaaccatttcttcgtttttcacaacgaacatgcccaatccactactttaggtccaaaactcatgtttggggtggtttcacgcaatttcattgccgcacgtcacccattccgaaaatgggtgtcggggtgcatacaagcacgagtttttgccaccggaaccatttcttcgtttttcgctacgaacatgcccaatccactactttaggtccaaaactcatgtttggggtggtttcgcgcaatttcattgccgcacgtcacccattccgaaaacgggtgtcgaggtgcatacaagcacgagtttttgccaccggaaccatttcttcgtttttcgcaacgaacatgcccaatccactactttaggtccaaaacacatgtttggagtggtttcgcgcaatttcattgccgcacgtcacccattccgaaaacgggtgtcggggtgcatacaagcacgagtttttgccaccggaaccatttcttcgtttttcgcaactaacacgtccaatccactactttaggtccaaaactcatgtttggggtggtttcgcgcaatttcgttgccgcacgtcactcattccgaaaatgggtgtcagagtgcatacaaagcacgagtttttgccaccggaaccatattttcgtttttcccaatgaacatgcccaatccactactttaagtccaaaacgcatgtttggggtggtttcgcgcgatttcattgccgcacgtcatccattccgaaaacgggtgtcggggtgcatacaagcacgagtttttgccaccggaaccatttcttcgttttttgcaacgaacatgcccaatccactactttaggtccaaaactcatatttgaggtggtttcgcgcaatttcattgcggcacgtcactcattccgaaaatgggtgtcgaggtgcatacaagcacgagtttttgccaccggaaccatttcttcatttttcgcaacgaacatgcccaatccactactttaggtccaaaactcatgtttggggtggtttcgcgtaatttcattgccgcacgtcacccattccaaaaacgggtgtcggggttcatacaagcacgagtttttgccaccggaaccatttcttcgttttttgcaacgaacatgcccaatccactactttagttccaaaactcatatttggggtggtttcgcgcaatttcattgccgcacgtcactcattccgaaaacgggtgtcgaggtgcatacaagcacgagattttgccaccggaaccatttcttcgtttttcgcaacgaagatgcccaatccactactttaggtccaaaactcatgtttggggtggtttcgcgcaatttcattgccgcacgtcacccattccgaaaacgggtgtcggggtgcatacaagcacgagtttttgccaccggaaccatttcttcgtttttcgcaaccaacatgcccaatccactactttaggtccaaaactcatgtttggggtggtttcgcgcaatttcattgccgcaagtcacccattccgaaatcgggtgtcgaggtgcatacaaagcatgagttttttccaccggaactatttcttcgtatttcgcaacgaacatgcgcaatccactactttaggtccaaaactcatgtttggggtggtttcgcgcaatttcattgtcgcacgtcacccattccgaaaacgggtgtcgggggtgcatacaaagcacgagtttccgc

SEQ ID NO: 561 - DNA, 4162 bp, Zea mays
  source: /note="Zea mays BAC clone full insert sequence contig bacm.pk010.m07.fis43"
tctaatcaacaccgggaggtcgacggtatctatcgcttgataggccgatctcgcatcagcaaggtcggtaaccacagggagttggttcagcgattgcattggcgcctcgggcttgctcgtcgtagtcggatcgcaagggtcatcttccgccaaatcggaattatctctactcgccgaaagatcgggcacttcagcttcatcatctactcgccaaaagatcgggcacctcagctacatcaattggtatcagattttcaggttgatcggtgagtttatcgagcgtttttttcctaaagtccacaaaaccacataaaaattcaggttagatcttatcccagcacccttttgagcctcgcactttctttcaataatctgcattgttgaatttgtgtgctttcgcgtttccttgttgctggttgcattgtgttcttccaccattctaaccctaacgccgccaccatctcccgtttgatcacgccacaaaccgagtcaacatcgtctccttgtttttctccttcggttacgtcaaaaaaaaacagaaaaaacaaaccgagtcaacggctgtttccttgtttttctccttcagttacgaaaaaaaaacagaaaaaaaacaaaccgagtcaacaaccgcttccttgtttttctccttcggttactcaaaaaaaaaacagaaacaaaaaaaaaaagaaaacgaaggagaaaggatacggttgtttcatcccggtcgtttttaaaacataacttgaggtaccttccgtaaaacgggcataacttttcgctcgggtgtccaaaaaatctgaaatttttacaggagcttgtcgacaccattctgagtccggccaaacttacctacggtctgtttggggttcgacaaaattgtcaaaaaaattcaggaaaataaagaaaaaaattcgtcaaagttctcgcacgcttttcagagaactttctgattttctatagaccacatctgatttctgttttaggtgaaacttcgtgtagctcctattttgttgcttcttgtgctgagaaaaatatcaaaaaaatcatacaaaaaaaagaaaaacaaaatcacttgtgattcctactagtggcctcgctagtacaatatttacggactgccattctgctagttccatccgtcctttgcacttgtggccagcaatatagtttcgtgatttgcactataattcaactttgcattattgtttgatcgtgctaatccttgacttgagtgcagcctacccaaaactccacatatttctacgacgagaaggtttctgtttatccaggcaatcgctcatccaatctttcaccggttccacctgttggttgcagttcaccactgtggcttggtaagaacggataagaacttgataacagcactagtgtgagcgccttgtgagcaatacacccctgtttttgtcgtttgtttttctccttttggtgttttggtgttgcgctaactatggcaggagcacacgacatggtggatgcccagttgcaggaagtaaggggacaagttgatggacttgctgcggacattaggacgatgcatgaacggcttgattcaacgatcacttcgacgaccgagcgtttcaaccaacttgaccttgctcaaacggcgactcgcaccacactcgacaccatcctggcacgccttgatgcattgaccacaaagatggagcaggaatacggcggtgacactgagcaggacgatggagatcgccgtggtcgtgcacgtcgtgtggttcgtcatccccctaatgacttattttctaagattaaatttaaaattccatcttttaatggtaaatatgatcctgctgcatatcttgattgggaattagaggtagaacagaaattttcatgccatgatattgctgctaatagccaagtgaaggctgccattagtgaatttactgattttgctttaatttggtggcatgagtataaacaaaaacttcccattaacagtgtcattacttggacccaattaaaagctgccatgcgccacagatttgttccttcctattatgctcgtgatttgcttaacaaaatgcagcgttttcaacaaggttcacagtctgttgaggaatattaccaggagttacaaaagggtatgcttcgttgtggtttagttgagtcggatgacgctgctatggcgcgttttcgtggtggtttgcacagggaaattcaggatatacttgattataaggattattttgatataaccactttgtttgaatatgcttgcaaagctgaacgtgaagtgcagggacgacgatcaaagacatatactaactctcttgcagggcggggtccaacacacagctcaactccttccagccctgcaccttctacgcctagcactacatcgcgcacagggacgaccaagccagtggcgccccctgccaaaggcgccgcttcttccacaggacgtacacgggatattcagtgccatcgttgcagagggtttgggcacatgattcgggactgcccaaacaagcgtaccttgcttatacgtgacaatggtgagtattcttcagccagtgattctgaggaaactagtcatgctatgattgccactaaccatgcagaaaatgaggaagtccacgttgatcccatcgacgccgataggtatgagagtcttgttgtgcagcgtgttctcagcacacaggttgcccaggccgaaaaaaatcagcgacacactctattccataccaagggcgtcgtgcacgaacggtcgattcgcatcatcatcgatagtggcagctgcaacaatttggcaagtacaacgttggtagagaaattatccttgcccactcgcacacatccacatccgtatcacattcaatggcttaatgatggtggtaaaataaaggtaacacgttcggtacgtgtccccttttcgctgggttcttattctgattatgctgattgcgatgttattcctatggaagcatgctctttgttattaggtcgaccttggcaatatgatactgatagtttacatcatggtcgttcaaatcattattctttcatgtttaaaggccagaaaataattatacatccaatgacccctgaccaaattttgaaagatgatcttactagggctgctaaaactgcacaacaagtcaaatcgacatcagccgcacctattaaatctgaaatcaagttgcactctcctgttttacttgctacacgtgctgattttgatgatctccatgaagctcataagccctgttatgcacttgtatgctcgcgcatgcttgttccgcttgatgatgcaccgtctttggatataccccctgctgttgttaaccttttgcaggagtatgctgatgtttatcctacggacttaccaccgggtcttcctcccctccgtgccattgagcatcagatcgatctcatccccggcgcttctcttccgaaccgcgccccgtaccgtacaaatccagaggagacgaaggagatccagcgccaggtgcagacgctgcttgataagggttacattcgtgagtctcttagcccttgctcggttcctgttttactcgttccaaagaaagatgggtcatggcgtatgtgcgtagattgtcgtgctattaataacatcacaattcgttatcgatatcctattccacgccttgatgatatgttagatgagcttagtggtgccgttattttctctaaggttgatttgtgtagcggttaccatcagattagaatgaaactcggtgatgaatggaaaacggcttttaaaacgaaatttggtttgtatgaatggttggttatgccatttggattgactaatgctcccagcacctttatgcgtttaatgaacgaagttctacgggccttcataggtttgtttgttgttgtttatttcgatgatatccttatttacagcaagtctatagaggagcatttagcacatttgcgtgctgtttttgatgctttgcgtgctgctcgcttgtttggtaacatggaaaagtgcacattttgcacgcaacgtgtctcgtttcttggttatgtggttactccgcagggcattgaggtggatagcagcaagattgctgccattcgggagtggcctacaccgacgacggtcacacaaattcggagctttcttggacttgccagtttctaccacaatcttgggtaa

SEQ ID NO: 562 - DNA, 4962 bp, Zea mays
  VARIATION (4928)..(4928): /replace="c" or "g" or "t"
  misc_feature (4928): /note="Nucleotide given in the sequence has no preference with respect to those in the annotation for said position"
  source: /note="Zea mays BAC clone full insert sequence contig bacm.pk010.m07.fis44"
tttgcattttggaaaataggaatataaaatgatctgtcaaacaaaacatactattgccaccctgtttctgctgttccaaactgagatactaaggttgtgttgccaatcctacatgacatatatacttattttctgtgctctgcagactgacgatgaacgtgaaatgtgtgcaaggactatctaccgcacaaacattgacaagaaggtttggtacctgcattcatgctactacctgtagttattcattctgtcatggttctgttttaatacacgcaggtcactcaagcagatctaaagttattctttgagtccatatgtggtgaggttggtcgttctttactccaaacacaatatcccttctgtacagctaaaagtttgcagaaatggtaccatcaagatcgatctggagaccaacaagatcatggacttcatcaagtttgacgtcggcaatgtggtcatggtgaccggcgggaggaacaccgggcgtgtaggagtgatcaagaacagggagaagtagtgggcagcttcgagaccatccacgtgttgtttggagctttttgctatgtctagttttctcctatttgttgtacaggaaaacatacaatggaattcaaatttggtggccccaaagtgtggagacttgaattcatataaagttaggcttaacattagtgcaaacagttgtattttagtttagatttagagtacacttatgtatgcgttgtttgacaatgcttatttatgatatattgaatgatacttatttatattatattaattataatgttgttcaatatatgtgtatgtatatttctctttcaaattattataacatgatatctaaaaatgattataaattgaagaatgtactgccgtgtaagtcatttcgtttaaatcttaataagacggtcaccaaaatgtctaatatcagtctcctaaataagatagtttctaaaacgtccattattagtcacctaaataagatggttttcctattgtaatcgtctattattgtaggatattcgagacagtttgataaatactttatgacttataatgtttgtattctctacggttctttagaagcagtgtcttaaacaaaaacctaattcaagatggtttatcggaaaaaatgacttaaacaaatacctttttcagacggttataaattaaaaattgtcttatataatatcttttaatacggtttataaccatcttaaatgtgggacatcttttacgactccatcaaatttggacacttcataagcgtcttaagaactaaaaattaaccgtctcatataacatgttttgtagtagtgataacaacagttatcaatccagcctaaggatggcacctttcaaaggtctctatggaagaaggtgtagaacaccactcaattggtctcagcctggagaaagagaagttttcggacctgacttagtgactgaagccgaaaggaaggtcaaactaatcaggaagaatctagaagctgctcaggccaggcagaagagttaccatgataagagaaggaaacctctccagttcgaggtgggagatttcgtgtatttgaaagtatcacccaccaagggagtgcagaggtttggaatcaaaggcaagctagcccctcattacattggaccttatgagatcatagaagcatgtggactcgtggcatataaattgaagttacctccaaaaatgtgtgtcatccacaatgtgttccatgtgtctcagttgaagaagtgtgttcgattgccgaccgagatcatagcagaaccagaattggagatagagccagatctatcgtaccaagagtacccttccaagattctggattgcaaggaaagatcaactcgggctaaatcaatcaagttgtataaggtccagtggagtaattactcagaggaagaggctacttgggagactgaggaattcttgcgatccaacttccccgattacctacctaaggaaattggtacgtaatcatacccaacccctcctcctgcccttcgaatctaaatttcagaaatataatcttagatcagaatgaagtaattatgaatcaaaatttaaaaggacttccttctgaagttgcaaagagaatgacattcgaagagcagtttgccctaataatagagcacccacttcttgtaagtctcacccttcgcttcaccccggaaggactctgacccgaatctcgggacgagattcctttaaggggggaaggttgtgacaccccagtgtcacctagggtttctctcagtgctaacccaagtattaacattttatgtgagccaaattaagcatgaagcatcaaattaacttgagaagaaaagatctactaagtgtatatctaaagaaccatgttccaaacaaataaggtttttcaaaaagggaaaagtgttgaaaccctaataccaaccctaattgcgctgtctcgtgctcgacgctgtgccaggcgctagagcgcgcactggcgttctcccgcgcacgccccgagcacttgtcagagcctcgccctcggccgtgcccgcccgcgcctataaagccttcccgggcgcgcctcacctcatgttgtgcttgaacattccaatccgagcccgcatctgaccgtggtgaccgtcacaagttggtgttcttctgcagtccgaatccagcatgttcaaatccttttccctttcggtcttctccctgattcctaagcaaaacaagagtgcacgggtctccatggtctaaatatgatggacatgaactcaagagtgtaatcacctgatggttgagttgacgagcacgagcgcgagtaatgggaccagaaattggtacttgtattggtatagatgcatcagtagtgtggatgtcttcatcaagcgggcagtacacaacgcatcaaaaacaacactcaaatgtttgaaatgctcttccatagtcttgttgtaaataaggatatcatcaaaatagacaacgacaaacaatcctatgaaggtccttagaactttgttcatcaaacgcataaaggtgcttggagcattactcaatccaaacggcataaccaaccattcatataacctaaacttcgttttaaaagttgttttccattcatcacccagtttcattcgaatctgatggtacccactacacaaatcaatcttagtaaaaataatggcactactatgctcatctagcatatcatcaaggcatggtataggatatcgataacgaattgtgatgttattaatagcgcgacagtcgacacacatacgccatgacccatctttctttggaacaagtaaaactggaactgagcaaggactaagagattcacgaatctaacctttatcaagcaatgcctgcacctggcgctggatctccttcatctcatccggattcgtaaggtacggggcacggtttggaagctgggcgccggggatgaggtcgatctggtgttcaatgccacgaagcgggggaagacccgatggcaagtccgtggagaaaacatcagcgtactcctgcaaaagtttagaaacagcaaggggaatatcctaaggcgggcatcatcaagtgaaacgagcatactagaacatacaagcgcatagcagggcaagtgagtatcacgtaggtcatcaaaatcagcacgtgtagcaagtaaaacaggagcatgcaacttgatttcagcattaataggggtggatggagtaggtgcatgttgctttgcagtttttgtagcccgagcaagatcatcttttataatttggtcaggggttatgggatggatattattttctgacccttaaacaagaaagaataatgattcgaacgaccatgatgtaaactatcagtatcatactgccacggtctatcaagtaaatgaaattgcgcgaaaccaacccaaacatgtgttttggacgtaaagtagtggattgggcatgttcgttgggaaaaacgaagaaatggttacggtggcaaaaactcgtgctttgtatgcaccccgacacccgtttttggaatgaatgacgtgcggcaacgaaattgcgcgaaaccaccccaaacatgtgttttggacctaaagaagtggatggacatgttcattgcgaaaaacgaaaaaatggttcctgtggcaaaaactcgtgcttgtatgcaccccgacacccgttttcggaatgggtgatgtgcggcaacgaaattgtgcgaaaccaccccaaacatgtgttttggacctaaagtagtggattgggcatgttcgttgggaaaaacgaagaaatggttccggtggcaaaaactcgtgctttttatgcacccgacacccattttcggaatgagtgacgtgcggcaacgaaattgcgtgaaaccaccccaaacatgagttttggacctaaagtagtggattgggcatgttccttgcgaaatacgaagaaatggttccggtggcaaaaactcgtgcttgtatgcaccccgatacccgttttcggaatgggtgacgtgtggcaacgaaattgcacgaaaccaccccaaacatgagttttggacctaaagtagtggattgggcatgttcgttgcgaaaaacaaagaaatagttccattggaaaaaactcgtgctttgtatgcaccccgacacccgttttcggaatgggtgacgtgcggcaatgaaattgcgcgaaaccaccccaaacatgagttttggacctaaagtagtggattgggcatgttcgttgcgaaaaacgaagaaatggttccggtggcaaaaacttgtgcttgtatgcaccccgacacccattttcggaatgggtgacgtgatgcaatgaaattgcgcgaaaccaccctaaacatgtgttttggacctaaagtagtggattgggcatgttcgttgcgaaaaacaaagaaatggttccggtggcaaaaactcgtacttctcctatttttgttatcgataccgtcgacctggcgaggtaggaatggtgccccct

SEQ ID NO: 563 - DNA, 5044 bp, Zea mays
  VARIATION (4905)..(4905): /replace="c" or "g" or "t"
  misc_feature (4905): /note="Nucleotide given in the sequence has no preference with respect to those in the annotation for said position"
  VARIATION (4982)..(4982): /replace="c" or "g" or "t"
  misc_feature (4982): /note="Nucleotide given in the sequence has no preference with respect to those in the annotation for said position"
  source: /note="Zea mays BAC clone full insert sequence contig bacm.pk010.m07.fis45"
tacaaaaaggcccctagggaaaccccatttcaaatctccaagtggagagagagctagagctctctaattccctctaagtcccattttagcaacaagatgtatcatgatctcagatgcaccctggatgttcccaaggaccctgagcttagaaagaagatactggacgaagctcacctttccaaattctccatgcaccctggtagcaacaagatgtatcatgatctcagatctctatattggtggactagaatgaaaagggaaattgccaaatacatatccgaatgtgacacctgccagagaattaaggctagtcacttgaaggcagcaggccatttgcaaccccttcccataccatcttggaaatgggaggacatttgcatggacttcatagtgggattacccaatacctccaggcaccatgattctatttgggttatcgtggacagattgaccaagactgctcatttcttgcccgtgcacaccacccacaagaccgagaagtatgctgagatttatgttgatcagatagtgagattgcatggtattcccaagaccattatatctgacagaggagcactgtttgtggcacgcttttgggagaaactgcaagaatcacttgggacccatgtcatccgaagctcagcataccacccacaaacagatggccagacagaaagggtgaatcaaattttggaagatatgttgcgagcctgtgcactacattatggaaaggaatgggacaagtgtctgtctttggcagagttctcttacaacaatagctatcagtccagtctgaagatggcaccttttgaggcattgtatgggagaaggtgtaggaccccattgaattggtctcaagcaggagaaagggaaatttttgggccagacttagtactcgaggcagaggcaaaggtcagggtcattaccaagaacttggaagctgctcaggctaggcaaaggagctatcatgataagaggcggaaacctctacagtttgaggtgggagatcatgtctatcttaaggtatcccccaccaagggtgttcagagattcgggatcaagggcaagttagcccctcgctacattggaccctatgagatcaaggcaagttgtggacccgtagcttaccaattggaattgccacctcacatgtcagcagtgcataatgtgttccatgtatctcagctacggaaatgtgttcgtctacccactgaagtactcccggaaccagacattgagatagaaccagatttatcctaccaagagtaccccgtcaaggtattagatcaaaaggatagatcaactcgggcaaggacagtaagaatgtataaggttcagtggagtcaccattcaacagaagaagctacatgggagactgaggattttctacgctctcgcttccccgactttctacccaaaagagtcggtatgtaaccacagaacccccccacctgccctttgaaatcaattataagggaaactaagatagcaagaatagtctaagttgggaattcaacttaagaagggcttccttctgaagttgcaaagagaatgacattcgaagagcagttaacaagagaaacttgagtataaagaaagagtagcaccaacacaccttccagcaccctccaagggactctacctcaaatctcgggacgagattcctttaaggggggagggctgtaacaccccaggtgttgccatggctggagcacaccttggcactcaagactatgatcacatgtggaagaacttaaggagcaaaagtataaggggctttggaaactaagtttttaccaagagttgggaatgaccaaaggcattaccctaattgtgtgcaactatcacctagggagagggggaaagaaccctaggcctctcttaaaccctatctcccaaaaccatggataagaggggaaagagagtgagcaaatgtgcaaaacatgggtaatttttacccaaaccctaagcaacattataaccatcaattaggggagggaaatattacaaaaaggcccctagggaaaccccatttcaaatctccaagtggagagagagctagagctctctaattccctctaagtcccattttagccctaaatcaaagatcaaccgtgttcactttaaaaatggcaccaaaaccacttgggttctataccaaaaatgtgcaataccacttagggcacccactggaaaaagttgagctcgagactcggacgtttgacatgccatggcatggcttttgtcgtgatatgctcagtatgacacacctgttttggcacccgaagatctccctccctaggccgtatctgccccggcgtctcacagttgagtgacagccctaggtgccaggaagaggtctgcgccggacttttgcaaagattcgcacgtttgcgacctctggcgacatttgaacactggaagaaacaaaccgccacgtgttcgacgccgtctgccgcgccagagcacgcccgcgcgcgcgcccgcgccgcgcccaagccaagccagtgccctggtccgcgtccgcgactataaaacgcccaggagccttggccgtacccctccgcacgcgctcaagcctcaccggagctcagttcgccgccgtttgcccatacgcgacgtgcccgcggccacccgagcccctgccaccgtagaccggccagcccagccattcccaaccccgtccagcccccggagaagactgtgcacgtctccgtgaagctccccgagcgaggaatcgggctctgcttcaacggagaggccggcccaaggtcaccggacttcaaccgaccgccggcaactgtggaccgaggtacaccgtgcgcctctcttcgattccttgcacggttagactccttagacctccacgaagctccctatgcccttggattgaactatgccgctgtggataggccggagcacgcgccgccgacgagctcgcccgcctgctcacgtggaccgggcgattccggccatccccgacgacgagccgtacctcgacgtgatcgccagaccctccgagccaatcctacccttcgccggacctccctcgccgccggtaagccgcgccacccttttctttcccgcggctactgtttcagttgagggagggactgcgggtgagagggagagaaacccagggggttaagtgaaaggtcagagactcaagtgaatagtgccttaagggtagatctgcgaggtttgaattgttttaaacccagggacctcggcgcaaactgtttttccaggaaaacttaattaaaacctaatttaaattcaaacagaaactttaaaaacccataacttctgtttggtttatccaattttggtcaaaccaattttgccagactctaaatcatgtaacctatttaggaaaaatataaaaccccttggtacggtggaaaacttaaaagttctgatttaatgttaactttggccaaaagctaaataatagtaagaaaaatagttaggctatttgactaaggttaggaaaatttggagaagtttatattcacctactaacctgtttaaaaatgttaaacccctctgtccattacattaagttagttttaaccccttattccaaatatgcttaagtttaagaaaaataggaaaagtgacacaaatattgaaccagagggcacccctatttttgttaagatacttagttaatgtagttcactagaaaaatatatcataccctgttttagtgtaaaataattaagatctcttttaaattaataaaacaaggataacttagaaaaactccacaaaaataaccccaaggtgaaaacacccccacccttgggatcactgttgttttattagaaagaacctaagaaaaatatgaaatctgctgtttgacatttttcaaataataaggaagtagaaagtgcctttttgacattaaacttgggaaaatcatagctaattaaccaccccttagtttcctatggtttttagcacaaagacctattattaccagaggatgtcaacaaaaataacctttaggacagagcctacccctaactaggaggtgtagtgtaaagtgcccctttttgcctaacttttgttatttttgtttaaggcctaacttttataccttaagcctcaaattcttaaaacaagctaaaatagccagtgacaacccactgtaatttttacagaatttttagaaattattaaaaccatgatgtagttcaaacctaccttagaaaccctaaatggaaaattaaataaaggaaaatgaaaaatgtgaaataatgatttccaaaaccttgtactctgtccactagagtgtatcaagacaatacaaattctactgtgttatcctaaagccaaacctaagcttaaagggtaataagtcaaagtctatgtataccactagaagccccacagaaccaggaaaccctaagttaattcttaacttagtttctttaacttaatgttcttaaatcttgcataatcatgacatacatgttcattgcatttcgatagactgtaatcttgcggacggagagtacatcctcgtgccggagcaaggagctgcccaggaggttgccccagatccagcaccagagccagcaccagaggacctgcctgccactgctttggaaggcaagccccgattttatgcataacctgttatttatgctattttacttcacttaatgattgtaggattgattgtgcacttaggtgtaggaattgtttgaaaccctagttgcatgatctcaggaatccttttgaaatgaatactagtatgacaggtcgagtagttgctttaattaaataggatctcggtagaagacgagtgatttttctagcactcgcgcgagatcaggaaattgattgtacccactttcacactatcatgatactagttggtggacaacaatccatggagattggttgtttacgagatggaaaatggaataaggattaacgtgcggatacctgtgtcaagcgtttgaatgtactaaacacataccgagaaatatggtaaatcggtaagcctagtacctgagtgaacctgcccgcagac

SEQ ID NO: 564 - DNA, 6464 bp, Zea mays
  source: /note="Zea mays BAC clone full insert sequence contig bacm.pk010.m07.fis46"
caagaccgagaagtatgctgagatttatgttgatcagatagtgagattgcatggtattcccaagaccattatatctgacagaggagcactgtttgtggcacgcttttgggagaaactgcaagaatcacttgggacccatgtcatccgaagctcagcataccacccacaaacagatggccagatagaaagggtgaatcaaattttggaagatatgttgcgagcctgtgcactacattatggaaaggaatgggacaagtgtctgtctttggcagagttctcttacaacaatagctatcagtccagtctgaagatggcaccttttgaggcattgtatgggagaaggtgtaggaccccactgaattggtctcaagcaggagaaagggaaatttttgggccagacttagtactcgaggcagaggcaaaggtcagggtcattaccaagaacttggaagctgctcaggctaggcaaaggagctatcatgataagaggcggaaacctctacagtttgaggtgggagatcatgtctatcttaaggtatcccccaccaagggtgttcagagattcgggatcaagggcaagttagcccctcgctacattggaccctatgagatcaaggcaagttgtggacccgtagcttaccaattggaattgccacctcacatgtcagcagtgcataatgtgttccatgtatctcagctacggaaatgtgttcgtctacccactgaagtactcccggaaccagacattgagatagaaccagatttatcctaccaagagtaccccgtcaaggtattagatcaaaaggagagatcaactcgggcaaggacagtaagaatgtataaggttcagtggagtcaccattcaacagaagaagctacatgggagactgaggattttctacgctctcgcttccccgactttctacccaaaagagtcggtatgtaaccacagaacccccccacctgccctttgaaatcaattataagggaaactaagatagcaagaatagtctaagttgggaattcaacttaagaagggcttccttctgaagttgcaaagagaatgacattcgaagagcagttaacaagagaaacttgagtataaagaaagagtagcaccaacacaccttccagcaccctccaagggactctacctcaaatctcgggacgagattcctttaaggggggagggctgtaacaccccaggtgttgccatggctggagcacaccttggcactcaagactatgatcacatgtgaaagaacttaaggagcaaaagtataaggggctttggaaactaagtttttaccaagagttgggaatgaccaaaggcattaccctaattgtgtgcaactatcaccttgggagagggggaaagaaccctaggcctctcttaaaccctatctcccaaaaccatggataagaggggaaagagagtgagcaaatgtgcaaaacatgggtaatttttacccaaaccctaagcaacattataaccatcaattaggggagggaaatattacaaaaaggcccctagggaaaccccatttcaaatctccaagtggagagagagctagagctctctaattccctctaagtcccattttagccctaaatcaaagatcaaccgtgttcactttaaaaatggcgccaaaaccacttgggttctataccaaaaatgtgcaataccacttagggcacccactggaaaaagttgagctcgagactcggacgtttgacatgccatggcatggcttttgtcgtgatatgctcagtatgacacacctgttttggcacccgaagatctccctccctaggccgtatctgccccggcgtctcacagttgagtgacagccctaggtgccaggaagaggtctgcgccggacttttgcaaagattcgcacgtttgcgacctctggcgacatttgaacactggaagaaacaaaccgccacgtgttcgacgccgtctgccgcgccagagcacgcccgcgcgcgcgcccgcgccgcgcccaagccaagccagtgccctggtccacgtccgcgactataaaacgcccaggagccttggccgtacccctccgcacgcgctcaagcctcaccggagctcagttcgccgccgtttgcccatacgcgacgtgcccgcggccacccgagcccctgccaccgtagaccggccagcccagccattcccaaccccgtccagcccccggagaagactgtgcacgtctccgtgaagctccccgagcgaggaatcgggctctgcttcaccggagaggccggcccaaggtcaccggacttcaaccgaccgccggcaactgtggaccgaggtacaccgtgcgcctctcttcgattccttgcacggttagactccttagacctccacgaagctccctatgcccttggattgaactatgccgccgtggataggccggagcacgcgccgccgacgagctcgcccgactgctcatgtggaccgggcgattccggccatccccgacgacgagccgtacctcgacgtgatcgccagaccctccccgagccaaccctacccttcgccggacctccctcgccgccggtaagccgcgccacccttttctttcccgcggctactgtttcagttgagggagggactgcgggtgagagggagagaaacccagggggttaagtgaaaggtcagagactcaagtgaatagtgccttaagggtagatctgcgaggtttgaattgttttaaacccagggacctcggcgcaaactgtttttccaggaaaacttaattaaaacctaatttaaattcaaacagaaactttaaaaacccataacttctgtttggtttatccaattttggtcaaaccaattttgccagactctaaatcatgtaacctatttaggaaaaatataaaaccccttggtacggtggaaaacttaaaagttctgatttaatgttaactttggccaaaagctaaataatagtaagaaaaatagttaggctatttgactaaggttaggaaaatttggagaagtttatattcacctactaacctgtttaaaaatgttaaacccctctgtccattacattaagttagttttaaccccttattccaaatatgcttaagtttaagaaaaataggaaaagtgacacaaatattgaaccagagggcacccctatttttgttaagatacttagttaatgtagttcactagaaaaatatatcataccctgttttagtgtaaaataattaagatctcttttaaattaataaaacaaggataaattagaaaaactccacaaaaataaccccaaggtgaaaacacccccacccttgggatcactattgttttattagaaagaacctaagaaaaatatgaaatctgctgtttgacatttttcaaataataaggaagtagaaagtgcctttttgacattaaacttgggaaaatcatagctaattaaccaccccttagtttcctgtggtttttagcacaaagacctattattaccagaggatgtcaacaaaaataacctttaggacagagcctacccctaactaggaggtgtagtgtaaagtgcccctttttgcctaacttttgttatttttgtttaaggcctaacttttataccttaagcctcaaattcttaaaacaagctaaaatagccagtgacaacccactataatttttacagaatttttagaaattattaaaaccatgatgtagttcaaacctaccttagaaaccctaaatggaaaattaaataaaggaaaatgaaaaatgtgaaataatgatttccaaaaccttgtactctgtccactagagtgtatcaagacaatacaaattctactatgttatcctaaagccaaacctaagcttaaagggtaataagtcaaagtctatgtataccactagaagccccacagaaccaggaaaccctaagttaattcttaacttagtttctttaacttaatgttcttaaatcttgcataatcatgacatacatgttcattgcattttgatagactgtaatcttgcggacggagagtacatcctcgtgccggagcaaggagctgcccaggaggttgccccagatccagcaccagagccagcaccagaggacctgcctgccactgctttggaaggcaagccccggttttatgcataacctgttatttatgctattttacttcacttaatgattgtaggattgattgtgcacttaggtgtaggaattgtttgaaaccctagttgcatgatctcaggaatccttttgaaatgaatactagtatgacaggtcgagtagttgctttaattaaataggatcttggtagaagacgagtgatttttctagcactcgcgcgagatcaggaaattgattgtacccactttcacactatcatgatactagttggtggacaacaatccatggggattggttgtttacgagatggaaaatggaataaggattaacgtgcggatacctgcgtcaagcgtttgaatgtactaaacacataccgagaaatatggtaaatcggtaagcctagtacctgagtgaacctgcccgcagacatatcccctcacgcgacctgagacgaggtctcccattccggttatggtgggtacaagtgcggtcactgcacgacggccagtcggggtcagtggggcattgtacgccaaggcggtgagccctgatctgttgccagggaatcgatggggacggttgatgtgtgtggggacggagtgcccctacatgtcgtgtgtttaggtttaccttgcaaggataaaaactcgattcgaatcgtctgcttctcgcagctaatgagactgcttgatccattgtactgcattgagtaataagtggaagtatgatgagttgagataagatgttgactgttaatgatgcttgctaccatgtatgagtagatagtccacttttagccttaagagagtcacacttaactttgattaagttaaaatcttgatttagaaactcagctagtgcttttggcaaccaaaccccacagccaaacagctgcatgtctagaggtagaggagtagactcctcacaccgggtaagtctagctgagtattagtatactcagccttgcttgtggcataatttttacaggttccctggaggagatggttgctgggataacttggccgaccaccctgccaccgggttggactgtcgagtgggaccctgcctcggctgaggaggagcatgaggagtgatgggacaggcttccccatctctctgttttatttaccgttagttttattccgctgcacttcgaacaatgatggatacttttgcaaaaactccgatgatgataatggtgatgtaataatttaacattatggcatgtatggttttatgctttattgtatttgctctgtgactcaccttcgagtgagattgtggtacttgatcctgtcagtggccgtgtcggactagatccgagggattgatgggttattcccatttaagtgtggtctagcctctaaggcgggacttggacacttaagttggaataattcgggcagttccgccacagctggtatcggagcttgtaccaccacagaggaatcaataaaatgtaaataccatcaattttctaaataaaacttgatagaaacaagttggatagatagtaggacgagcaggatagacctaggacgtgaagccttaggttaatagaagggtagctaggtggctaagtaactaggccctacagaccacttttacaggatgggagttcctccctattccttctatcttgttgtgaggtcgttcaggacgagcatgcatgcattcaaaattaagcaattggataactgagtaaaagacttaaaaacaagataacaaccaactaggtccctagtgcctttttacttaactagaggagggctgagttttattttccttgttctttttacattctttttcttttacttacgcttgaccgtacacagatgacttcccacggatcctccgatgaaggaaatgcactgacccacactgacggacttgcacgagagggttttccccgcattttatgggaagtgcttcagggagccggatacatgacaccccctcagtacgcggtgcagcagttcgagaagcaccgagtgccccgctgtagggtgaggatgactctggagcctcatcccctgcagccaggctggcgctccttggactcagagtctttcgggtaccgggcagaggacacgatcgaggcgatcgctctgcatggattgactaccttctgcgggttccatcccttggagctggctacccatcccattggcttgttccccgctgaaaaggaggacgacccaatgtggaaggatcgggtggaacatgccaaggacatctgggccatctacccaggacagactgcgcacttaacagtacggtgcatgaatgctctgtaccatctgcaagtgatgcgcggtgaggcaatgtcccatt

SEQ ID NO: 565 - DNA, 9603 bp, Zea mays
  source: /note="Zea mays BAC clone full insert sequence contig bacm.pk010.m07.fis47"
ccatagtcgagtttttgttttttggcttaaattaattaagagatacaaatgttgctaatattttctgcaaacttagagtttgactggaaagaataccatagcagtccttattttgggacagaggaagtgtgtcttgatgcatccaaatttgcaagcacgctggtgaaggctatcacctattagataatgatggacagtgacatgcatacttgttttttgtcttcgaaaattggaatgctaaagctcaagcagcttgtcgcttttaatacatataaaatctaaattgtttccgaagaaaaaaaatgccacaaccatatgtactgcctaagatgggatatgacgttcaattaaatggcattcatgttttcttactttacgtctcaatgacatgtggctcctgaacttcacatgccattgagacataaagctacaaaatcctgaatcaccactaaattgagtgacatgtcctgaatgattcccctggatctgacagtttgtctgacaccttgagctggtctgtagagctgggaaaaaacaatggactgccatagtccaggtcaaggtttaatgcccgccagcttcaaagtgcggacaattccacttgatggtgatgaggatgcaactgaggaggtcttggatcctgattttggggaagccgcaataggccgtgtggcacctgttgattcaggtaatgttgataatgggtttggttgtttttgttttggctactctgcattccctgctttaattttggtacctgataaaaactgggcttcaggtctatggtggatcatattgctgagggcatacggaaaatgttcaggggatctgtcagtacaagagagaattgatgtccagaccggaatgaaaatgattctgaagctttgcttagctgatggtttcgacatgttccctacattgctcgtaacagatggttcatgcatgattgatcgtcgaatgggaatccatgggcacccacttgaaattcaggttttctttttgctacacctagttatattttctgtttcatacgggtcttttttcccaagttgattttttgtgattgtttttgaggcaccttttaaaagaataaaatacacaaacattcttcaaattgtctgggaatgtcatctaggttcccaaacgattagtttggattcaaaacatccctgatcttcctaaatggttcactcagggttcgatccttcaaaatcagctagtccacgaccatcctacttggcagcccctacatctctttctcccccctctcgttcacaccttgttaatgtccatcagcatagagtcttgttagtgtccacgtcgccagccaaaggatttaccatggggtttgcaccttgagtgaaccacataacaagttgagggacatgaaattgcaaattaatagctcagggatctcgataacatgcttggacaagttttagccactgctgatgcatcttagtcctattaaaagtgtaatttacagtgccacgtcccctattttacacgatccaccgaagacaacttaggactacagcaagacctgtctagatgtctaaaaaaatgacagacccagtgctggcagctctcacatgagtggggtccggaggagtaaccaaggcaatccttacctctgcattttgcagagaggctgcattgaatcctagaccttttgctcagtggaaaggtttctcaccattgtgccagacctgcccttctcacttgtctagatgtctacaaggaaaaaatccagcatcctagaggagttgcagagattagtttctttttaatttgatcttttaatttatcgaaatagcagattttatgtcagaagtttgtacaagtcttgttcttgtaggaatatgcaaaatctaaccctaggatagggtggcctgtgtattaatagccatttggagttgggcctggcccattacagagggacaagagagtaaatgtacccaaaccctaatacagttccaacacccctccgcagtcacaactctatcctgtacagatgttgagactagagcgaaagtctaaaaatacactcgacggtaaccccttgtgaagatgtcagcgaactgcagcgtagttgggacgctgagaacccgaacgtcaccgacggcgacacgctcgcggacgaagtgcaggtcgatctccacgtgcttcgtgcgctgatgctgtacgggattggtggagaggtagactgcgctgacgttgtcgcagtagacgagggtggcgcgctggaggggactgtggagcttgtggaggagctgtcgcagcaggaggcctctgccacgccgttggccacggcgcggtactcggcctcagcactggagcgagagacgacgggctgccgcttggcggcctaggagacgaggttggcgcccaggaacacggcgtaaccagaggtggatcgacgcgtgtctggacagccagcccagtcggcgtcggtgtagaccacgagttccgacgtcggggatggtcggagaagaaggccgtagtcgagggagtcacggaggtagcgcaggatccgcttgagagcggtgagatgaggctcccgcggggtgtgcatatggaggcacacttgatggacgacgtaggcgatgtcaggcctggataaggtgaggtactggagcgcgccggtcaggctccggtaggatgtcgcatcggcgaccaggggcccgacgtcctctgagagcttcgcctgagtgtcgacaggcgtggagcagggcttgcagtcggacataccagcccgctccagtatgtcgatggcgtactggcgctgatggaggaagagaccctggggccggcgctcggcggtgatgccgaggaagtggtggaggggccctaggtccttcatcgcgaactcccgctgcagggcgacgatcgtgcgctgtaggaggtcggcggtggatgccgtgagcacaatgtcgtcgatgtagagcagaaggaagacggtgtcgtcgccgcggtggtagatgaagagggacgtgtccgacttggcctcgacgaagccgatggaggtcaagtaggaagcgaagcggctgtaccaggcccgcgacgcctgcttgaggccgtagagggagcggttcagcctgtagaccagatctggacgggcttcgtcgacgaagccggtgggctggctgcagtagacagtctccgtcagagtgccgtggaggaaggcattcttgacgtcgagctgatggatcgcccagtcccgggagagggcgagggagaggacggtgcgaacagtggcgaacttgacgacggggctagaggtctcgtcgtagtccactctggggcgttgggtgaagccccgaaggacccaacgggccttgtagcgatcgagggagccgtccgaagtaagcttgtggcgaaatagccacttgccggtgaccacgttggcgcctggtggacgtggcaccaggtcccaggtgtggttggccaggagggccgcgtactcctccatagcgcgtcgccagtgtggttcggcgagagcggtgcgaacggaggaggggaccggggaagcgtccggtggagtggtaggcgtagcagctgccaagatcagccggtcgacaatcgaaggacgccagtggcgcgctgggtcaccatcgggtggacgtgccagggatcgcggtggatagcgaccgagtggtacatcggtggctcggggcggtctgccgggacgtcaggggctgcgggcgtggccgactcgcagcgatgatggatgacggcggggtcggcgaagcgcaccgggctcgtcaacgggcccgggtcagcgactgccgaggtagtgacgtggcggtgacggtggtagatgagcgcggggtcggtgaagcgaaccgttggcgtcgacggggccgcgcgaggtgcgggaggggtcggcggggccgcccgaggcgcgggcgtggtcgacggggtcgcgcatggcgcaggcgtggtcgacggggccgcacgtggcacatgcgtggtcgtcggggccgcgcgtggcgcaggcgtgatcgacggggccgcgcgtggcgtgggaatatgtgcgagccgcggcgtcgaggccgcatggggtgcgggtaacgacgcaaggcggggcgcctgggaggagggggagactggatcggactcgaggagggagtcgagatcggtaggcggggaggggccaacaaggggaaacacatcctcatcaaagacgacgtgacgagagatgatgatgcggtgggaggtgaggtccagacaccgatatcccttatggtcagatgagtagccaaggaagaggcagtgggtggagcgaggagaaagcttatgaggggcagtagcagaagtgttagggtagcaggcacaaccgaacacgcgaaggtggtcgtaggtgggggctgtgccgtacagggcgaagtagggagtagggtggctcaccgccttggagggaagacagttgaggaggtgggtggcggtgtgtagggcttctgcccagtagctggcagggagagacgcctggaagagaaggcagcggatcatgttggtggtggtgcgaatcatgcgctctgcccgaccgttctgggcggaggtgtaggggcacgagagacgcagctgaacgccactggtgaggaagaatgaccgagaggcgtggttatcgaaatcgcggccgttgtcgcaatgcaaagcacgaaccgggcgctgaaactgggtggatacccaggcgaagaagtgagtgagggtggtaaacgtgtcggacttcaaccgaagggggaaagtccaaagaaaatgggagtagtcgtccagaatgaccaggtagtatttgtagccggagaggctaaggacaggagacgtccagagatcacagtggacaagatcaaaggcctgaacaaccctggacgtggaagtggaaaaaggaagacgagagtgacggccgagctgacaagcatgatagaggtgctcagaagagcctcgagtataggatatgtctgagtggctggagagttgggacatgacgtcaggtccagggtgcccgaggcaacagtgccaaatggcggaggaggtggtggtagtagcaagagcatgtgatgtggtggtagtagtaagtgcaggagatgaggctattctggtgggggaagtggagggcaagtgaagagaatagaggggaccggagctgtcacagcgagcgagcacaacatgtgtgggaaggtggcgtatggtgagatcccaggggtcgaactccataaagcagtggttgtcactagtgaagcgacgaaccgagaggaggggatgagtcagaccgggagcaacaaggacgtcgttaaggcagaatggtccaggaagaactgatgcacctactgatgtgaccggaagagtggaaccgttgcctacgacaatggaggaaggatgtgaggggtgtggtggatgggagtggaataacgaactagttgtgggagtggtgtggaaggaggccccggagtcgaccacccaatcggtgggagagggagacagtggggaggccatagggtgcacggagagaccagaggatgagctctgacgtggttactgggaggggagggagggaacgagggctcaatggccagggaggcgatcactgcacgagggaagacaaggggtctaggcacgtgacggtcggcctgggggtggagttcgacgcagtcacaaaggacagggctcatggtgggatcgaagctcacgaaggtgccccggacgagctggccatcgttgagaaggacgcgcacagccatcccgacagaaacgggcggagacaagaagtggcgccgacggccagggcaaaagcacgaccgtggtagtcaggagccacgggagcagcgggcgaggcaaagctcatgtgtggtggtggggacgccatggaaccgggacggagctcaaccggcgcagcaaagccgagggcgaggatgtccactgtgtcacagaagcagggcgcacagggggtgagcgggctgtacggccacgactgctgctccggccaggccaacccactgcggcacgacaggagggagcgcaggggggcaggctgctccggcgaggccgacccacttgcggcacgggcttggaagagcgggcacggcgccggggcccagcgcagcaggagaggggccagatggcggccggcggtggacgacgaagattcggcggccggggcagggatcggcgggctctgtaggtgctgggggcggggcagagaggaagcaagagcagcgagtcggcgctccggcggttgcaacggtccaaggcgctcgtggccgacagcgccacgcgcagccgcacgcgcctgctgcttcagtcggacgatgtggccgcgcgcgaggggagggcgcggatgtggtgggcggtgccgcggccaccgagcacgctagctggtcggggcgcggtggagcccgagctcgccggctgggggagggagaggtgagcgcggccggatggtcgacgacgcggttgagcccgagctcgccggccggggggaggaggaagacgtcgaccggagaagggggagaagcgggtgcggccggcgaccaggaaggagagaggggatggaggcgatctggcggtggccggagggggatggggaaaggggcagcggcggcggccaggggctggcggccggctaggggagggaggaagtttgtgtggctctagtaccatgtaggaatatgcaaaacctaaccttaggatagggtggcctgtgtattaatagccatttggagttaggcctggcccattacagaggggcaagagagtaaatgtacccaaaccctaatacagttccaacagttctaatcctgagctgatgtaagcattttccacctaaaagttaacatcacttgcgcttgtaatctaaatgaaaacaatctaatgttcaaagcctgttgcaatatgttcaaagtctgttgcaaacttgcaataaaacatggatactatcgggggttttatataggggatgaatttgtattggaaaatggcctgaagcagtgagctttttggattgattggcatggatagacaagttgatcattagtagcagtgaggatggtactgcagagaataaactaatgcagacaacatttgtgattaggacagacacaagtttacaaggacaataaccatgcaaaactcaatccaagctccatggtctcaaaaaagaaaaagaaaaaagaggcacacattttttctgtacatgataagttagctcatgcacattgttttgtgtgtaggcactcttctattcagccctcttgtgtgcgcgtgagatgttgactcaagaagatggatcagctgacttaatccgtgccctgaacaatagacttattgcactgtcctttcatatcagagagtactattggcttgacatgcaaaaattgaatgagatatatcgatataaaacagaagaatattcttatgatgctgtcaacaagttcaacatttaccctgatcagatttctccatggcttgttgagtggatacctcctaagggtggttactttattggaaacctccagccagctcatatggacttccgattcttttcactgggaaatttatggtcaatagtaagcagcttggcaacaactcatcagtcgcatgccattttagaccttattgagtctaaatggtctgatttagttgcagagatgccactaaagatatgctatcctgctcttgaaaaccaggaatggaaaatcatcactgggagtgaccctaaaaacacgtgagccttagatgttttttcaatttttaccctctacctgggatcatgttgcagttcctttttacatgcttggcaatttctttttcgtacaggccttggtcataccacaatggaggatcctggccaacattactgtggcaggtttgcattctctaaactggtttcctatttctgtagatttactgtgtcttgctgttgaattggtttttatctgtccgcatgcaaggcatggtgtcattttgacacactgctgcatttagccaaacttgctgagatttactggcaatctgttcgctcgcattttgcacttctcctttatgatgcgcacattgaatgttgttgagcagtggcaaccattttgtgcagctcacagtggcatgcatcaagatgaacagaccagaacttgctgccaaagctatagaagtagctgagaggcgaatcgctactgacaaatggccggagtactacgacaccaagagagcacgattcattgggaaacagtcgcggctgtaccaaacgtggtctattgctgggttcctagtagccaagctactaatagaaaagccagacgctgctaggattctgtggaacgatgaggatgctgaaatccttaatgcttcgagcacaaacagaaaacgtggcaagaaagtgttgaagaaaacatacatcgtgtgagttctcgcagcaagttcgattaaattcctcagttagcatttttaagttgtaatataggaagtgttgtccctgtatataaacttaaatgaggttgcatttttgctggggagggtgcctgctgttggaattggatgctgttattgtcgatgcatctggctttgcaacaaatcatagacctgcctcgtagtttcgctatacactttatttggcatgacaagttttcggagtctcattaccggactgaagccatatttgaatacactaagctaacgttagctgctaaaattagctgaagacattcaaataacttaactaatattctagctagtaactgcttttagctgaatgtattcaaacacccacctataatagtccagctatctattagttgcactcataactatccattagtttaataccttggtcagttgagctaacatcagctaatagttagtcaattactagttagctagctgatttcactagcaatttttagtgacataactattagtactactgtattcaaacatgctcttaattttggaatatggatttacctcgttgctctggttttccaggtagtattacgaacatctttgaaacacacgagttgtcacaggtgctgacaacaatgttacatagcaagaccaagagtttaactaaaaattgatatcatcttgatttagctattttgtaaaatatataagaaaccccataaaaaggtaggctgcttcggagtctatctaaatttgccatcatatttagatcgtatttaaatgcattagaggtaatagttagctgctaaaattagttagagacatctaaacaatctatgtaacattttagttattagatgcttttaggtggaggcatttaaacaccctagctaagcgtccaactaactattagttattagttagccacctactagttcgtcaactaactacactagcaattttagtacatccaaacaagcccttaaaactgccatgtcctatgtccaatgtcttcattcgtcttcacgacaatcacaaataacgagccaatgtccttccacatgtagtcggctgccgtctaagagatcctttggaacataggaatttcagagaaataatacagaaattttacatgaatcaattaattttcacaagaaaagcataggaaattggaaaaaatcagcattccaaagggcccccagagtcctgagc

SEQ ID NO: 566 - DNA, 14120 bp, Zea mays
  source: /note="Zea mays BAC clone full insert sequence contig bacm.pk010.m07.fis48"
attgaatttagaatttttaaggctttgtgccttcataggtggccagtccaagactgccctctcccatttgaaagctcgtttcactactacagtaaacctctgtacaggcggtgcaccacaagcggttcctggaaccgcctgtgtagaggctatacaacatctcatgatagccgagccttacatagaggaacacctggatgagcttcgtaaagaaaatcagaaccgcacaggggactggatcatgagggagcacaaacatcgtttcagcgaatgcttaatggacaaaaacatcccattcggagactctttggaagagaaaacaatgaagaatttggcttctgggccatcgtgttttgtgacatcatggcaagcatatgacatcaatgggtacacattctacactaaatcaaaagacatgaaaagtgttgcacaaaatagcgatgttcgtatcgatgcttttgacctacatggacagaagaccacatattttggattcatagaggaaatatgggaacttgattatggcccaagcatgaaaatacccttatttaagtgccaatgggtacaacatcccgtgggggtgatagtggataactacggactcacactggtagacttaaagaaagtaggatataaagatgacctgtgggttctcgccgaatgtgttgcacaagtgttctatgtactcgatccagcagatgagaagatgcatgtagttatttctggaaagcaaaaaattgttggagttgagaatgtgggagacgaagatgaggaatacaataagtatgaagagatgttcgtctttaacggtccagagagaatcaagcgtgtggaaaagaaaattgataagaactgatgaggacatcaccatcattgatacaaccataccagtgaccacttcaccattcgtagctaatcaaggaccaatgacacgagcccgtgcacgtaaacttaattatcacgtgaactcgttccttgctattgaagctaattcttctttaaatgaggtactaaagccttgcgatgactttattatgctcaggtgtttgggaggtgaaccatcttggactggagaaggcaacaaggcaataaaggctgctgcacccgagaggatttcgtaacagcaccaagtacaagtttaaatggggcatatcttccaacttccaaggccgtttaatgcaaataaatacttgttggaaagctcccttcgtatacttgctggtggatcaagaattaatgggagactacacctgaggcgtccagaaactgccgagggaacttcatgactccaccagaattccttcttcctatttctctatttaagcaactagcagccaccaaagaacatgggggttttgtttgatgtaagtttagcctttgctacttccttgtaaacgcgtgtgtcggctagaccacccgaatacttgaaacgagaccccaactttatcagatcggtgcgtgtttgcttgttatcttgttcttgcttgttctcgattgcttgcaggttcaaggctgttcttggcacggcaagagcagcaacaacaggagccggtgtaactatcgctaaggcgcagcacccttgtggttgttgtagtcggatagcacaacgtcgacctccaccccaaatcgtagttatcaggagacggtgtacctgtcgctcaaggcgcaacaccatcttggttgtggtagtcgggcagccaacgtcgttctccaacaagttttccacctccatcatctctcatcgaaagatcgggcacccttctacccattgggtttatcaagaacttaaagccatacatgcggaaaaatggtagttcataaaaaattgtatgaatcaaattgtatttgtgtcggggaccataattaggggtaccctcaaggctcctaattctcagctggtaaccccaaccagcacaaagctgcaaaggcctgatggtgcgattaagtcagggatcagtccattcgagggactcgatcacgcctcgcccgagcctagcctcggacaagggcagccgaccccggagggtttccgtctcgcccgaggcccccctccagcggcgaacatatttccggctcgcccgaggccctgtcttcaccaagaagcaaccctgaccaaatcgccgcaccgaccgaccaaatcgcaggagcatttaatgcaaaggtggcctgacacctttatcctgacgcgcgccccccagccggcagagccgaagtgaccgccgtcacttcgtcgctccactgaccggcctgacagaaggacagcgccgcctgcgccactccgactgcggtgccacttgacagagtgagactaacaggcggtcaggccctgccgaaggcaccataggaaactctgcttcgcccgacccatggctcggacacgggctaagtcccggaagacggtgaactccgctccgcccgacccagggctcggactcgggctaagtccaggaagacggcgaactccgctccgcccgacccagggctcggagtcgggctaagtcccggaagacggcgaactccgctccacccgacccagggctcggacttgggctaagccccagaagacggcgaactccgctccgcccgaccccagggctcggactccgccctggcctccgcctcgcccgacccaggggctcggactcgacctcagccacggaagacagactcgacctcggcttcggaggagcttccacatcgcccaacctaggacgcagaccggccacgtcaacaggaggcgccatcatcaccctaccctgagctgactcgggccgcagggaacaagactggcgtcccatctggctcgctccgccagacaggcaatgatggcgccccgcattctctgtgacgacggcggctctcagcccccttacggaagcaagaggacgtcagcaaggactcaatcgctccgacagctatccctccgccaggctccatcgctcctccgacggccacgacatcacaccagctgggtgccaaaatctctccggctgccacaacggcgtgtacttagggcgctagctctcctccgctagacacgtagcactctgctacaccccccattgtacacctggatcctctccttacgcctataaaaggaaggaccagggccctcttagagggggttggctgcgcggggacgaggacgagataggcgctcgcttgaagccgctcgctccctctcccgcgtggacgcttgtaactccctactacaagcgcacccgacctgggcgtgggacgaacacgaaggccgcgggattcccacctctctcacgccggtctccgaccgcctcgctctccccccttcgcgctcgccctcgcgctcgacccatctgggctggggcacgcggcgacattcactcgtcggcccagggaccccccggtctcgaaacgccgacagttggcgcgccaggtaggggcctgctgcgtgttgacgaacagcttcccgtcaagctccagatgggcagtctccagcaacctctccaacccgagacggtgctccgtttcgggagtcttgagttcatgtccctcgatggcagctacgacatgatactccttccaccgccgcgcgacaacgacaatggcagccgactgcccgcccgccggcggcggaatcgacgacgtcttcctcgcgtggtggaagaacaaccttcgagctcatcccgccctcttccccgccgtcagaggggaaggcagggcaaccaaggccaagcaggaggcagcgcctcgtcggctgtcgagcgagtcgacagcgccggcaccccaacggggagcgcaccgggtatcgacttcgcgcttgagatgaagacgagtgtcgtctccccgcgacacgccaatcccgagcaagcggacgacgccagcgcgctcgcgaaaagcttgctggacgtcaccctcgtacctgagacgatggtgcagtcagtccccggcgtgactttatcgccgctcgtcgaccaaaaggtaccgaccgattcccatcccacgtcatttggattcagcctcaacccgcctagcgaccccgctttggcgggcgctctcgaagaggcgagtccaaaccctctggggtttcgcatgcggtcgccttgggaccggctgacggacgtctcgaccgtcgggccctctgggtccgaggaagactacgagcccaacatctgttgggatttctctggacttggcaaccccagtgccatgcgggacttcatgaccgcatgtgactactgcctctccgactattccgacggtagccgcagcctcggcgacgaggactacggcccgagccgcagcctcggcgacgaggactacggcccgagccgcgaatgtttccacgtcgatctagggggtccctccgaaggcaatcatctcggcatgccggaggacggtgatctccctaggccggtgccccgcgttggcatcccacgggagctagctgtggtccccgttcagacgggggggcatgacccacagctcgagcaaatccgcggggtgcaggccaggctcgacgagggagcaggagcgcttgagccgatccgccgggacgtcgggcaggcatgggcgggccaacccccggccggagaaatacgtcatctgccccagggcttccagcaccgcgtcgccgacgacgtcagggtcaggccaccacccgcatctagtggggtcggccagaacctggctgcagcagcgcttctccgcgcgatgccggagccatcaaccaccgagggccggcgaatccagggggagctcaagaatctcctggaaggcgccgcggtccgacgggccgagagctctgcctcccgaaggcaggggtacccctcggaaccttatgccacgacttcccgattcatgtgggaagcctcggtctacaccgggcgcacgcgcaacaccacgcctgtggccccgggccgcctcggcaacgagcaccatcaccgcgaccgtcgggcccacctcgacgagagggtgcgccgaggctaccaccccaggcgtgggggacgctacgacagcggggaggatcggagtccctcgcccgaaccacccggtccgcaggccttcagccgggccatccgacgggcaccgttccagacccggttccgacccccgaccactatcacaaagtactcgggggagacgagaccggaactgtggctcgcggactaccgtctggcctgccaactgggtggaacggacgatgacaacctcatcatccgcaacctccccctgttcctctccgacaccgctcgtgcctggttggagcacctgcctccggggcagatctccagctgggacgacctagtccaagcttttgccggcaatttccagggcacgtacatgcgcctcgggaattcctgggacctccgaagctgccggcagcagccgggagagtctctccgggactacatccggcgattctcgaagcagcgcaccgagctgcccaacatcaccgactcagatgtcatcggcgcgttcctcgccggcaccacctgccgcgacctggtgagcaagctgggtcgcaagacccccaccaggacgagcgagctgatggacatcgccaccaagttcgcctccggccaggaggcggtcgaggctatcttccgaaaggacaagtagccccagggccgcccatcggaagatgctcccgaggcgtcaactcagcgcggcgccaagaagaagggcaagaagaagtcgcaagcgaaacgcgacgccgccgacgcggaccttgtcgccgccgccgagtacaagaaccctcggaaacccccaggaggtgccaacctcttcgacaagatgctcaaggagccgtgcccctatcaccaggggcccgtcaagcacacccttgaggagtgcgtcatgctccggcgccacttccacagggccgggccacccgcggagggtggcagggcccgcgacgatgataagaaggaagatcaccaagcaggagagttccccgaggtccgcgactgcttcatgatctacggtgggcaagtggcgaacgcctcggctcggcaccgcaagcaagagcgtcgggaggtctgctcggtgaaggtggcggcgccagtctacctagactggtccgacaagcccatcaccttcgaccaggccgaccaccccgaccatgtgccgagtccggggaaatacccgctcgtcgtcgaccccgtcatcagcaacgtcaggctcaccaaggtcctcattgacggaggcagcagcctcaacatcgtctacgccgagaccctcgggctcctgcgtgtcgatctgtcctccgtccgagcaggcgctgcgcccttccatgggatcattcccgggaagcgcgtccagcccctcggacaactcgagcttcctgtctgcttcggaacaccctccaacttccgaagggagaccctgacgttcgaggtggtcgggttcagaggaacctaccacgctgtgctgggaagaccgtgctacgcgaagttcatggtcgtccccaactacacctacctgaagctcaagatgtcgggccccaacgggatcatcaccgtcggccccacgtacaaacacgcgttcgaatgcgacgtggagtgcgtggagtacgccgaggccctcgccgagtccgaggccctcatcgccgacctggagagcctctcgaaggaggtgccagacgtgaagcgtcatgccggcaactttgagccagcggagacggttaagtccatccccttcgaccccagcggcgacgcctccaagcagatccggatcggctccgggctcgatcccaaataggaagcagtgctcgtcgactttctccgcgcgaacgccgacgtttttgcgtggagtccctcggacatgcctggcataccgagggatgtcgccgagcactcactggacatccgagccggagcccgacccgtcaagcagcctctgcgccgattcgacgaggagaagcgcagagccataggcgaggagatccacaagctaatggcggcagggttcatcaaagaggtattccatcctgaatggcttgccaaccctgtgcttgtgagaaagaaaggggggaaatggcggatgtgtgtagactacactggtctcaacaaagcatgtccgaaggttccctaccctctgcctcgcatcgatcaaatcgtggattccactgctgggtgcgaaaccctgtctttcctcgatgcctactcagggtatcatcaaatcaggatgaaagagtccgaccagctcgcgacttctttcatcacacccttcggcatgtactgctatgtcaccatgccgttcggcttgaggaatgcgggcgcgacgtaccagcggtgcatgaaccatgtgttcggcgaacacattggccgcacggttgaggcctacgtcgatgacatcgtagtcaagacgaggaaagcttctgacctcctttccgaccttgaagtgacattccgatgtctcaaggcgaaaggcgtcaagctcaatcccgagaagtgtgtcttcggggtgccccgaggcatgctcttggggttcatcgtctccgagcggggcatcgaagccaacccggagaagatcgcagccatcaccagcatggggcccatcaaggacttgaaaggcgtacagagggtcatgggatgtctcgcggctctgagccgcttcatctcacgcctcggcgaaagaggtctacctctgtaccgcctcttgaggaaggccgagtgcttcacttggacccctgaggccgaggaagccctcgggaacttgaaggcgctcctcacaaaggcgcctatcctggtgcccctagctgccggagaagccctcttggtctacgtcgccgcgaccactcaggtggttagcgccgcgattgtggtcgagaggcaagaagaggggcatgcattgcccgttcagaggccagtttacttcgtcagcgaggtactgtccgaaaccaagatctgctacccacaagttcagaagctgctgtatgcagtgatcctgacacggcggaagttgcgacactacttcgagtctcatccggtaaccgtggtgtcatccttccccctgggggagatcatccagtgccgagaggcctcgggtaggattgcaaagtgggcggtggaaatcatgggcgagacaatctcgttcgcccctcggaaggccatcaagtcccaggtcttggcggacttcgtggccgaatgggtcgacacccagctaccgacggctccgatccaaccgaagctctggaccatgttcttcgacgggtcgttgatgaagacgggagccggcgcaggcctactcttcatctcgcccctcgggaaacacatacgctatgtgctacgcctccatttccctgcgtccaacaatgtggctgagtatgaggctctggtcaacgggttgcggatcgccatcgagctaggggtccgacgcctcgacgctcgcggtgactcgcagctcgtcatcgaccaagtcatgaagaactcccactgccgcgacccgaagatggaggcctactgcgatgaggttcggcgcctggaggacaaattctacgggctcgagctcagccacatcgcccggcgctacaacgagactgcggacgagctggctaaaatagcctcggggcgaacaatggttccccggacgtcttctcccgagacctacatcaaccctccatcaagatcgacgacacgcccgagcccaaggcaccctcggcccagcccgaggtaacctcggctcagtccgaggtatcttcggcacggcccgaggcaccctcagcccggcccgagccaccctcggctcagcccgaggcaccctcggcacccgagggtgaggcactgcgcgtcgaggaggagcgaagcggggtcacgcctaatcaaaactggcggaccccgtacctgcaatatctccactgaggagagctacccctcgaccgagccgaggctcggcggttggcgcgacgcgccaagtcgttcgtcttgctgggcgatgagaaggagctctaccaccgtagcccctctggcatcctccagcgatgcatctccatcgccgaaggtcaggaactcctgcgagagatacactcgggggcttgcggccatcacgcagcgcctcgagcccttgtcgggaatgctttccgacaaggcttctactggccgacggcagtggccgacgccactagaattgttcgcacctgcgaagggtgtcagttctacgcaaggcagacccacctgcccgctcaggctctgcagacgatgcccatcacctggccttttgctgtgtggggtctggatctcgtcggccccttgcagaaggcacccgggggctacacgcacctgctggtcgccatcgacaaattctccaagtggatcgaggtccgacccctaaacagcatcaggtccgaacaggcaatggcgttcttcaccaacatcatccatcgcttcggggtcccaaactccatcatcaccgacaacggcacccagttcaccggcagaaagttcctggacttctgcggggatcaccacatccgggtggactaggccgccgtagctcaccccatgtcaaatgggcaagtagagcgtgccaacggcatgattctgcaagggctcagcctcggatctacaatgacctcaacaagttcggcaagcgatggatgaaggaactcccctcggtggtctggagtctgaggacaacgccgagccgaaccacgggcttcacgccgttcttcctagtctacggggtcgaggccgtcttgcccacagacctggaatacggctccccgaggacgagggcctacaccgaccaaagcaaccaagctagccgagaagactcgttggaccagctggaggaggctcgggacaaggccttactacactcagcgcggtaccagcagtccctgcgacgctaccacgcccgaggggtccggtcccgagacctctaggtgggcgacctggtgcttcggctgcgacaagacgcccgagggcggcacaagctcacgccccatccgggggcagcaagagaaccctctctcacgacgtgaagacaacgcgcccgtgctccgttcctcgaacggctcgcgcatgcgcaacggccgccccgccaaccactcgccccgtcgcattaactccgcggcgggacaggcggcgcccctggcaggagaagctggcgacgcttcgccttcgccataatgaccgcgtcaaaaaaggtacgccgcgtcgttcgatttcgtatccttttccttttttcctctttctctctcttgcaacagggaccgggaaagggggataccccgaaaaggatccttccccgtgaaggaactaggctctgagcctctctactgattagaggttcgaaggctggccccccggaagggttcgacagccgcctcagatcgtgtgggccctacacccactactggtcagaggttcgaaggccggcccctcggaagggttccacggccgcctcaggctactcgggctccgcgcccattactgatcaggggttcgaaggctggcccccgaagggttcacagccgcctcaaactccgagcgagggatgaccatgggtacgttcgatacataaccaaggcttgggctgcgctcccgaggtaccctaggacatttccgagaccagcgggaacgatcttgtaacggaatcccatcagagggaggcattgagccctcggaccccgttgccaggggaccgggtccgacagatcacccgcaggtacttttgggcgtgcctctgggcccctagccgacccctaacgaacggggcacggacgtccactcggattaccctcttgcagctcaccagagacaccatgttcggcgcccatcgagggcaacatggcgctttccccccctcctccttgcggaaaggcgacgcaggggcgtatgtaaaaaagccgagtctgtccctgatcgccctctcgccttgtgcggaggctcgggggctgctctcgcaaacccggctccggccgaaccgttgacagcgtcaacataccagcccgagaacttgggacccgaccgtacacccgggctacggccagctcgcatgagggaacgaccagaccagccgaagcattacgcgaggcattaagacctcgaaggagtgaaaccactcctccgaggcctcgggggctacacccggcgggtgcgctcgcgcgcacccaccgaaacaaaacgcaaccgagaaaggctggtccccttgcaaaaaagtgcgacgaaagcctccaagcgagtgctaacactcccttcgaggctcgggggctactgtcggggaccataattaggggtaccctcaaggctcctaattctcagctggtaacccccatcagcacaaagctgcaaaggcctgatgggtgcgattaagtcagggatcattccattcgagggactcgatcacgcctcgcccgagcctagcctcggacaagggcagccgaccccggagggtttccgtctcgcccgaggcccccctccagcggcgaacatatttccggctcgcccgaggccctgtcttcgccaagaagcaaccctgaccaaatcgccgcaccgaccgaccaaatcgcaggagcatttaatgcaaaggtggcctgacacctttatcctgacgcgcgccccccagccggcagagccgaagtgaccgtcgtcacttcgccgctccactgaccggcctgacagaaggacagcgccgcctgcgccactccgactgcggtgccacttgacagagtgagactgacaggcggtcaggccctgccgaaggcaccataggaaactccgcttcgcccgacccagggctcggacacgggctaagtcccggaagacggcgaactccgctccgcccgacccagggctcggactcgggctaagtctcggaagacggcgaactccgctccgcccgacccagggctcggacttgggctaagccctagaagacggcgaactccgctccgcccgaccccagggctcggactccgccctggcctcagccggcggcctccgcctcgcccgacccaggggctcggactcgacctcagccacggaagacagactcgacctcggcttcggaggagctttgatgaggacatcactatgagtacgactacaccagcagcacctccacatcaagcgccacttccttcattagctgggccaatcactcgggcccgtgccagagatcttaacttcgtcatgctactgaagaatgagggcccagaagaatagacgaccagcccaactgcggcccatagtggacgacctagggttggccgcccctaggggctgcgccccctctatttatccaggagctgcgcctcctttattctcgagttttgttttacgttagccttagctactctcgaacgcgcgcaaatctgcgctgtcttcgtgtattcagaactccaccctcgagtaatagattagattgctcgcatctttttcttgttcgttcttcgattgcgcacaggaaacgatcttcgtgatcaggccgatctcgcatcagcaaggtcggtaaccacagggagttggttcagcgattgcattggcgcctcgggcttgctcgtcgtagtcggatcgcaagggtcatcttccgccaaatcggaattatctctactcgccgaaagatcgggcacctcagcttcatcaattggtatcagatttccaggttgatcggtgagtttattgagcgttttttttcctacagtccacaaaaccacattaaaattcaggttagatcttatcccagcaccttttgagcctcgcactttctttccataatctgcattgttgaatttgtgtgctttcgcgtcatttgttgctggttgcattgtgttcttccaccattcaaaccctagcgccgccaccatctcccgtttgatcacgccacaaatcgagtcaacattgtttccttatttttctccttcggttacgtcaaaaaaaaacagaaaaaaacaaaccgagtcaacggccgtttccttgattttctccttcggttacaaaaaaaacagaaaaaaaaacaaaccgagtcaacgaccgcttccttgtttttctccttcggttacataaaaaaaacagaaacaaaaaaaaagaaaacgaaggagaaaggatacggttgtttcatcccggtcgtttttaaaacataacttgaggtaccttccgtaaaccgggcataacttttcgctcgggtgtccaaaaaatctgaaatttttacaggagcttgttgacaccattctgagccctgtttggtttcgacaaaattgtctgtttggtttcgacaaaattatcaaaaaaattcaggaaaataaagaaaaaaattcgtcaaagttctcgcacgcttttcagagaacttcctgattttctatagaccacatctgatatctgttttaggtgaaacttcgtgtagctcctatcttgttgcttcttttgctgagaaaaatatcaaaaaaatcatacaaaaaagaaaaacaaaatcacctgtgttttctactagtgcctttttggcatcactagtacaatatttacggtactgccattctgctagttccatccatcctttgcacctgtggccagcaatatagtttcgtgttttgcactataattcaactttgcattattgtttgatcgtgctaatccttgacttgagtgcagcctacccaaaactccacatatttctacgacgagaaggtttctgtttctctaggcaatcgctcatccaatctttcaccggttccacctgttggttgcagttcaccactgtggcttggtaagaacggataagaacttgataacagcactagtgtgagcgccttgtgagcagtacacccctgtttttggtcgttggtttttttctccttttggtgttttggtgtttgcgctaactatggcaggagcacacgacatggtggatgcccagttgcaggaagtacggggacaagttgatggacttgctgctgacattaggacgatgcatgaacggcttgattcaacgatcacttcgacgaccgagcgtttcaaccaacttgaccttgctcaaacggcgactcgcaccacactcgacaccatcctggcacgccttgatgcattgaccacaaagatggagcaggaatacggcggtgacactgagctggacgatggagatcgccgtggtcgtgcacgtcgtgtggttcgtcatccccctaatgacttattttctaagattaa

SEQ ID NO: 567 - DNA, 889 bp, Zea mays
  source: /note="Zea mays BAC clone full insert sequence contig bacm.pk007.b16.fis1"
ccttgatgacctaaagtagtgtattgggcatgttcgttgcgaaaaacgaagaaatagttccggtggcaaaaattcgtgcttttatgcactcgacacccgttttcggaatgggtgacgtgcggaaacgaaatttcgcgaaaccaccccaaacatgagttttggacctaaagtagtggattgggcatgttcgttgcgaaaaacgaagaaatggttccggtggcaaaaactcgtgctttgtatgcaccccgacacccgttttcagaatcggtgacgtgcgacaacgaaattgcgcgaaaccaccccaaacatgagttttggacctaaagtagtggattgggcatgttcgttgcgaaaaacgaaaaatggttccgggggcaaaaactcgtgctctgtatgcaccccaacacccgttttcggaatggatgacgtgcgataacgaaattgcgcgaaaccaccccaaacaagagttttggacctaaagtagtggattgggcatgttcgttgcgaaaaacgaagaaatggttccggtggcaaaaactcgtggttttatgcacccgacacccgttttcggaatgggtgacgtgcgacaacgaaattgcgcgaaaccaccccaaacatgagttttggacctaaagtagtggattgggcatgttcgttgcgaaaaacgaagaaatggttccggtggcaaaaactcgtgcttttatgcacccgacacccgttttcggaatgggtgacatgtgacaacgaaattgcgcgaaaccaccccaaatatgagttttgtacctaaagtagtggattgggcatgttcgttgcgtaaaacgaagaaatggttccggtggcaaaaactcgtgctttgtatgcaccacgacacccgttttatcaaggaaaa

SEQ ID NO: 568 - DNA, 1155 bp, Zea mays
  source: /note="Zea mays BAC clone full insert sequence contig bacm.pk007.b16.fis2"
taaactaacgggcgaggtcgaacggtatctacatgcttgatcgggtgcatacaaagcacgagtttttgccaccgaaaccatttcttcattttttgcaacgaacatgcccaatccactactttaggtccaaaactcatgtttggggtggtttctcgcaatttcgttgtcgcacgtcacccattccaaaaacgggtgtcgggtgcatacaaagcacgagtttttgccaccgaaaccatttcttcgtttttcgcaacgaacatgcccaatccactactttaggtccaaaactcatgtttggggtggtttcacgcaaattcgttgccgcacgtcacccattccgaaaacggttgtcgagggtgcatacaaagcacgagtttttgccaccggaaccatttcttcgtttttcgcaacgaacatgcccaatccactactttaggtacaaaactcatgtttggggtggtttgcacaattttgttgtcgcacgtcacccattccgaaaatgggtgtagggggtgcatacaaagcacgagtttttgccaccggaaccatttgttcgtttttcgcaacgaacatgcccaatccactactttaggtccaaaactcatgtttggggtggtttctcgcaatttcgttgtcgcacgtcacccattccgaaaacgggtgtcgggtgcatacaaagcacgagtttttgccactggaacgatttcttcgtttttcgcaacgaacatgcccaatccactactttaggtccaaaactcatgtttggggtggtttcgcgcaatttcgttgtcgcacgtcacccattccgaaaacaggtgtcgggtgcatacaaagcacgagtttttgccaccggaaccatttcttcgtttttcgcaacgaacatgcccaatccactactttaggtcaaaaactcatgtttggggtggtttcgcgcaatttcgttgtcgcacgtcacccattccgaaaacgggtgtcgtggtgcatacaaagcacgagtttttgccaccggaaccatttcttcgttttacgcaacgaacatgcccaatccactactttaggtacaaaactcatgtttaaggtggtttcgcgcaatttcgttgtcacatgtcacccattcatcaaggaggtagataccgtcgacctcgcggtttgtgt

SEQ ID NO: 569 - DNA, 189 bp, Zea mays
  source: /note="Zea mays BAC clone full insert sequence contig bacm.pk007.b16.fis3"
ccagcttggtgttgttgatcggcgcgcggatgaaaccgcgctgggtaccatccgggccgatgatcaccaggttgccgctgtggtcgacggtgtagttttccttgctggtgtcagccgggatatagggaatgcttaccgagttggcgaatttctgcagggtcgcctcttcgccagtcagacccttgaagc

SEQ ID NO: 570 - DNA, 1159 bp, Zea mays
  source: /note="Zea mays BAC clone full insert sequence contig bacm.pk007.b16.fis4"
gtggcaaaaactcgtgcttttatgcaccccgacaaccgttttcagaatcggtgacgtgcggcaacgaaattgcgcgaaaccaccccaaacatgagttttgtacctaaagtagtggattgggcatgttcgttgcgaaaaacgaagaaatggttccggtggcaaaaactcgtggtttgtatgcacccccgacaaccgttttcagaatgggtgacgcgcggaaacgaaattgcgcgaaaccaccccaaacatgagttttggacctaaagtagtggattgggcatgtttgttatgaaaaacgaagaaatggttccggtggcaaaaactcgtgcttttatgcacccgacacccgttttcagaatgggtgacgtgtgacaacgatattgcgcgaaaccaccccaaacatgagttttgtacctaaagtagtggattgggcatgttcgttgcgaaaaacgaagaaatggttccggtggcaaaaactcgtgctttgtatgcaccccgacacccgttttcagaaagggtgacacgtgacaacgaaattgcgcgaaaacaccccaaacatgagttttgtacctaaagtagtggattgggcatgttcgttgcgaaaaacgaagaaatggttccggtggcaaaaactcgtgctttgtatgcacccccgacacccgttttcggaatgggtgacgtgcgacaacgaaattgcgcgaaaccaccacaaacatgagttttggacctaaagtagtggattgggcatgttcgttgcgaaaaacgaagaaatggttccggtggcaaaaactcgtgcttttatgcactcgacacccgttttcggaatgggtgacgtgtgacaacgaaattgcgcgaaaccaccccaaacatgagttttgtacctaaagtagtggattgggcatgttcgttgcgaaaaacgaagaaatggttccggtggcaaaaactcgtgcttttatgcacccgacactcgttttcggaatgagtgacgtgcggcaacgaaattgcgcgaaaccaccccaaacatgagttttggacctaaagtagtggattgggcttgttcgttgcgaaaaacgaagaaatggtcatcaagcgaagaaataccgtcgacctcccggggttggagtgacccaatcgccctgtaggagtctataccgcgtcg

SEQ ID NO: 571 - DNA, 1625 bp, Zea mays
  source: /note="Zea mays BAC clone full insert sequence contig bacm.pk007.b16.fis5"
tctaatcaaaccggcgaggtcgacggtatcgtctaccttgatgcaacgaacatgcccaatccactactttaggtccaaaactcatgtttggggtggtttcgcgcaatttcgttgtcgcacgtcacccattccgaaaacaggtgtcgggtgcatacaaagcacgagtttttgccaccggaaccatttcttcgtttttcgcaacgaacatgcccaatccactactttaggtcaaaaactcatgtttggggtggtttcgcgcaatttcgttgtcgcacgtcacccattccgaaacgggtgtcgtggtgcatacaaagcacgagtttttgccaccggaaccatttcttcgttttacgcaacgaacatgcccaatccactactttaggtacaaaactcatgtttaaggtggtttcgcgcaatttcgttgtcacatgtcacccattccgaaaacgggtgtcgggtgcataaaagcacgagtttttgccaccggaaccatttcttcgtttttcgcaacgaacatgcccaatccactactttaggtacaaaactcatgtttggggtggtttcgcgcaatttcgttgtcacacgtcacccattccgaaaacgggtgtcgagtgcataaaagcacaagtttttgccaccggaaccatttcttcgtttttcgcaaagaacatgcccaatccactactttaagtccaaaactcatgtttggtgtggtttcgcgcaatttcgttgtcgcacgtcacccattccgaaaacgggtgtcgtggtgcatacaaagcacgagtttttgccaccggaaccatttcttcgtttttcgcaacgaacatgcccaatccactactttaggtacaaaactcatgtttggggtggtttcgcgcaatttcgttgtcacacgtcacccattccgaaaacgggtgtcgggtgcataaaagcacgagtttttgccaccggaaccatttcttcctttttcgcaacgcacatgcccaatccactactttaggtccaaaactcatgtttggggtggtttcgcgcaattttgtttccgcacgtcacccattccgaaaacgggtgtcgggtgcataaaaacacgagtttttgccacctgaaccatttcttccttttttgcaacgaaaatgccccatccactactttaggtgcaaaaaacatgtttgggggggtttcgcgcaaattttttgtcgcacgtcacccattccgaaaaaaggtgtcggggggcatacaaaccacaagtttttgccaccggaaccattttttcttttttttcaacaaaaatgccccatcccctacttttggtgcaaaaaacacgtttggggggggttctcgcaaattttttgtcccacgtcaccccttctaaaaacaggggtgggggggataaaaaaacaaatttttttctcccggaaacttttttttttttttttaaccaaaaagccccaaccaccacattttgtgcgcaaaacacgtttgggggggggtttcacaaaaattttgtcgcacgggaccccctctgaaaaaaggtggtggggggggtataaaaaaaaaaattttttgctccaaacaattttttttttttttggccaaaaaacccccccccacattgtggggcaaaa

SEQ ID NO: 572 - DNA, 1518 bp, Zea mays
  source: /note="Zea mays BAC clone full insert sequence contig bacm.pk007.b16.fis6"
atccactactttaggtccaaaactcatgtttggggtggtttcgcgcaatttcgttttcgcacgtcacccattccgaaaacgggtgtcgggtgcatataaagcacgagtttttgccaccggaaccatttcttcgtttttcgcaacgaacatgcccaatccactactttaggtccaaaactcatgtttggggtggtttcgcgcaatttcgtttccgcacgtcacccattccgaaaacgggtgtcgggtgcataaaaagcacgagtttttgccaccggaaccatttcttcttttttcgcaacgaacatgcccaatccactactttaggtccaaaactcaagtttggggtggtttcgcgcaatatcgttttcgcacgtcacccattctgaaaaagggtgtcgggggtgcatacaaagcacgagtttttgccaccggaaccatttcttcgtttttcgcaacgaacatgcccaatccactactttaggtccaaaactcatgtttggggtggtttcgcgcaatttcgttgtcgcacgtcacccattccgaaaacgggtgtcgggtgcatacaaagcacggatttttgccaccggaaccatttcttcgtttttcgcaacgaacatgcccaatccactactttaggtccaaaactcatgtttggggtggtttcgcgcaatatcgttgtcgcacgtcacccattccgaaaacgggtgtcgtggtgcatacaaagcacgagtttttgccaccggaaccatttcttcgtttttcgcaacgaacatgcccaatccactactttaggtacaaaactcatgtttggggtggtttcgcgcaatttcgttttcgcacgtcacccattccgaaaacgggtgtcgggtgcatataaagcacaagtttttgcgaccggaaccatttcttcgtttttcgcaacgaacatgcccaatccactactttaggtacaaaactcatgtttgggggtggtttcgcacaatttttttgtcacccgtcacccattctgaaaacgggtgtcggggggttacaaagcacgagtttttgccaccggaaccattttttctttttttgcaaagaacatgcccaatccactactttaggtccaaaaatcatgtttggggtggtttcgcgcaattttgttgtcacacgtcacccattccgaaaacgggtgtcgggtgcatacaaagcacgagtttttgccaccggaaccattttttcgttttttgcaacgaacatgcccaatccactactttaggtccaaaactcatgtttgtggtggtttcgcgcaattttgttgtcgcacgtcacccattccgaaaacggttgtcgggggtgcatacaaagcacgagtttttgccaccggaaccatttcttcgtttttcgcaacgaacatgcccaatccactactttaggtacaaaactcatgtttggggtggtttcgcgcaatttcgttgccgcacgtcaccgattctgaaaacggttgtcggggtgcataaaagcacgagtttttgccac

SEQ ID NO: 573 - DNA, 3156 bp, Zea mays
  source: /note="Zea mays BAC clone full insert sequence contig bacm.pk007.b16.fis7"
gagttgtttcagcgattgcattggcgcctcgggcttgctcgtcgtagtcggatcgcaagggtcatcttccgccaaatcgggaattatctctactcgccgaaagatcgggcacttcagcttcatcaagtggattgggcatgttcgttgtgaaaaacgaagaaatcgttccggtggcaaaaactcgtgctttgtatgcaccccgacaaccgttttcagaatgggtgacgtgcggcaacgaaattgcgcgaaaccaccccaaacatgagttttggacctaaagtagtgaattgggcatgttcgttgcgaaaaacgaagaaatggttccggtggcaaagagtcgtgctttgtatgcaccccgacaaccgttttcagaatgagtgacgtgcggcaacgaaattgcgcgaaaccaccccaaacatgagttttggacctaaagtagtggattgggcatgttcgttacgaaaaacgaagaaatggttccggtggcaaaaactcgtgcttttatgcacccgacactcgttttcggaatgagtgacgtgcggcaacgaaattgcgcaaaaccaccccaaacatgagttttgtacctaaagtagtggattgggcatgttcgttgcgaaaaacgaagaaatggttctggtggcaaaaactcgtgctttgtatgcacccgacacccgttttcagaatgggtgacgtgcggcaacgaaattgtgcgaaaccaccccaaacatgagttttggacctaaagtagtggattgggcatgttcgttacgaaaaacgaagaaatggttccggtggctaaaactcgtgcttttatgcacccgacacccgttttcagaatgggtgacgtgtgacaacgaaattgcgcgaaaccaccccaaacatgagttttgtacctaaagtagtggattgggcatgttcgttgcgaaaaatgaagaaatggttccggtggcaaaaactcgtggtttgtatgcacccgacacccgttttcggaatgggtgacgtgcgacaacgaagttgcgcgaaaccaccccaaacatgagttttggacctaaagtagtggattgggcatgttcgttgcgaaaaacgaagaaatggttctggtggcaaaaactcgtgctttgtatgcacccgacacccgttttcagaatgggtgacgtgcggcaacgaaattgtgcgaaaccaccccaaacatgagttttggacctaaagtagtggattgggcatgttcgttacgaaaaacgaagaaatggttccggtggctaaaactcgtgcttttagcacccgacacccgttttcagaatgggtgacgtgtgacaacgaaattgagcgaaaccaccccaaacatgagttttgtacctaaagtagtggattgggcatgttcgttgcgaaaaatgaagaaatggttccggtggcaaaaactcgtggtttgtatgcaccacgacacccgttttcggaatgggtgacatgtgacaacgaaattgcgcaaaaccaccccaaacatgagttttgtacctaaagtagtggattgggcatgttcgttgcgaaaaacgaagaaatggttccggtggcaaaaacttgtgctttgtatgcacccgacacccgttttcggaatgggtgacgtgcgacaacgaaattgcgcgaaaccaccccaaacatgagttttggacctaaagtagtggattgggcatgttcgttgcgaaaaacgaagaaatggttccggtggcaaaaactcgtgctttgtatgcacccgacacccgttttcagaatgggtgacgtgcgacaacgaaattatgcgaaaccaccccaaacatgagttttggacctaaagtaatggattgggcatgttcgttgcgaaaaacgaaaaaatggttccggtggcaaaaactcgtggtttgtatgcaccccaacacctgtttttggaatgggtgacgtgcgacaacgaaattgcgagaaaccaccccaaacatgatttttggacctaaagtaggggattgggcatgttcgttgcaaaaaatgaagaaatggttccggtggcaaaaactcatgctttgtatgcacccgacacccgttttcggaatgggtgacgtgcgacaacgaaattgcgagaaatcaccccaaacatgagttttggacctaaagtagtggattgggcatgttcgttgcgaaaaacgaagaaatggttccggtggcaaaaactcgtgctttgtatgcaccccgacaaccgttttcggaatgggtgacgtgcggcaacgaaattgcgcgaaaccaccccaaacatgagttttggacctaaagtagtggattgggcatgttcgttccgaaaaacgaagaaatggttccggtggcaaaaactcgtgcttttatgcacccgacactcgttttcggaatgagtgacgtgcggcaacgaaattgcgcgaaaccaccccaaacctgagttttgtacctaaagtagtggattgggcatgttcgttgcgaaaaacgaagaaatggttccggtggcaaaaactcgtgctttgtatgcaccccgacacccgttttcggaatgggtgacgtgcgacaacgaaattgcgcgaaaccaccccaaacatgagttttggacctaaagtaatagattgggcatattcattgcgaaaaacgaagaaatggttccggtggcaaaaactcgtgctttgtatgcacccgacacccgttttaggaatgggtgacgtgcgacaacgaaattgtgcgaaaccactccaaacatgaattttggacccaaagtagtggattgggcatgttatttacgaaaaacgaaaaaatggttccggtggcaaaaacccgtgcttttatgcaacctacaaccgttttaggaatgggtgacctgtgacaacaatattgcgcgataccacccccatgattaattttcgaccctaattaatccgattgagcccgttctttgcatagaacaaagaaatgggttcagtgcgcaaaaactctggtattgtggcacactcaatcccgttttcacaaagggtgacgtgccacaaaaaaattgtcgcgaaccccctcaaatctggattgtgaacctaaaccaaaaaaaatcgggctccccttccgaaaaaaaaaaaaatggcttgggggaccaaaatattgggttttatactaaccaaagggccg

SEQ ID NO: 574 - DNA, 1763 bp, Zea mays
  source: /note="Zea mays BAC clone full insert sequence contig bacm.pk007.b16.fis8"
ctttaggtccaaaactcatgtttggggtggtttcgcgcaatttcgttgccgcacgtcacccattccgaaaacgggtgtcgggtgcataaaagcacgagtttttgccaccggaaccatttcttcgtttttcgcaacgaacatgcccaatccactactttaggtccaaaactcatgtttggggtggtttcgcgcaatttcgttgtcgcacgtcacccattccgaaaacaggtgtcgggtgcatacaaagcacgaatttttgccaccggaaccatttcttcgtttttcgcaacgaaaatgcccaatccactaccttaggtccaaaactcaagtttggggtggtttcccgcaatttcgttgtcacacgtcacccattccaaaaacgggtgtcggggtgcatacaaagcacgattttttgccaccggaaccatttattctttttacgcaacaaacatgcccaatccactactttaggtacaaaactcatgtttgggggggtttcgcgcaatttcgttgtcacatgtcacccattccgaaaacgggtgtcgggtgcataaaagcacgagtttttgccaccagaaccatttcttcgtttttcgcaacgaacatgcccaatccactactttaggtacaaaactcatgtttggggtggtttcgcgcaatttcgttgtcgcacgtcacccattctgaaaatgggtgtcgtggtgcatacaaaccacgagtttttgccaccggaaccatttcttcgtttttcgcaactaacatgcccaatccactactttaggtacaaaactcatgtttggggtggtttcgcgcaatttcgttgtcgcacgtcacccattccgaaaacgggtgtcgtggtgcatacaaagcacgagtttttgccaccggaaccatttcttcgtttttcgtaacgaacatgcccaatccactactttaggtccaaaactcatgtttggggtggtttcacacaatttcgttgccgcacgtcacccattctgaaaacgggtgtcgggtgcatacaaagcacgagtttttgccaccggaaccatttcttcgttttttcgcaacgaacatgcccaatccactactttatgtccaaaactcatgtttggggtggtttcgcgcaatttcgttgtcgcacgtcacccattccaaaaacgggtgtcgtggtgcatacaaagcacgagtttttgccaccggaaccatttcttcgtttttcgcaacaaaaatgcccaatccactactttaggtccaaaacccaggtttggggtggtttcccgcaatttctttgtcccacgtcccccattccaaaaacgggtgtcggggggcatacaaagcacgagtttttgccaccggaaccattttttcgttttacgcaaaaaaaatgcccaatccactactttaggtccaaaactcatgtttggggtggtttcgcacaatttcgttgccgcacgtcacccattctgaaaacgggtgtcgggtggttacaaagcacgagtttttgccaccggaaccatttcttcgtttttcgcaacgaacatgcccaatccactactttaggtccaaaactcatgtttggggtggtttcgcgcaatttcgttgtcacacgtcacccattccgaaaacgggtgtcgagtacatacaaagcacgagtttttgccaccggaaccatttcttcgtttttcgcaacgaacatgcccaatccactactttaggtccaaaactcatgtttgtggtggtttcgcgcacatatcaagtggaga

SEQ ID NO: 575 - DNA, 2318 bp, Zea mays
  source: /note="Zea mays BAC clone full insert sequence contig bacm.pk007.b16.fis9"
tgtgtgtacctaaagtagtggattgggcatgtttgttgcgaaaaacgaagaaatggttccggtggcaaaaactcgtgctttgtatgcacccgacacccgttttcggaatgggtgacgtgcgacaacgaaattgcgagaaaccaccccaaacatgtgttttggacctaaagtagtggattgggcatgttcgttgcgaaaaacgaagaaatggttccggtggcaaaaactcgtgctttgtatgcaccccctacacccattttcggaatgggtgacgtgtgacaacgaaattgcgcgaaaccaccccaaacatgagttttggacctaaagtagtggattgggcatgttcgttgcgaaaaacgaagaaatggttccggtggcaaaaactcgtgctttgtatgcaccctcgacaaccgttttcggaatgggagacgtgcggcaacgaatttgcgcgaaaccaccccaaacatgagttttggacctaaagtagtggattgggcatgttcgttgcgaaaaacgaagaaatggtttcggtggcaaaaactcgtgctttgtatgcacccgacacccgtttttggaatgggtgacgtgcgacaacgaaattgcgagaaaccaccccaaacatgagttttggacctaaagtagtggattgggcatgttcgttgcaaaaaatgaagaaatggttccggtggcaaaaactcatgctttgtatgcacccgacacccgttttcggaatgggtgacgtgcgacaacgaaattgcgagaaatcaccccaaacatgagttttggacctaaagtagtggattgggcatgttcgttgcgaaaaacgaagaaatggttccggtggcaaaaactcgtgctttgtatgcaccccgacaaccgttttcagaatgggtgacgtgcggcaacgaaattgcgcgaaaccaccccaaacatgagttttggacctaaagtagtggattgggcatgttcgttgcgaaaaacgaagaaatggttccggtggcaaaaactcgtgcttttatgcaccccgacaaccgttttcagaatcggtgacgtgcggcaacgaaattgcgcgaaaccaccccaaacatgagttttgtacctaaagtagtggattgggcatgttcgttgcgaaaaacgaagaaatggttccggtggcaaaaactcgtgctttgtatgcaccccccaccacctttttcagaatgggtgacgtgcgacaacaaaattgcgcgaaaccaccacaaacatgatttttggaccaaaagtagtggattgggcatgttcgttgccaaaaacgaagaaatggttccggtggcaaaaactcgtgcttttatgcacccgacacccgttttcggaatgggtgacatgtgacaacgaaattgcgcgaaaccaccgcaaacatgagttttgtacctaaagtagtggattgggcatgttcgttgcgtaaaacgaataaatggttccggtggcaaaaactcgtgctttgtatgcaccacgacacccgttttcggaatgggtgacgtgcgacaacgaaattgcgcgaaaccacccccaacatgagttttggacctaaagtagtggattgggcatgttcgttgcgaaaaacgaagaaatggttccggtggcaaaaactcgtgctttgtatgcacccgacacccgttttcggaatgggtgacgtgcgacaacgaaattgcccaaaaccaccccaaacatgagttttggacctaaagtagtggattgggcatgttcgttacgaaaaacaaaaaaatggttccggtggcaaaaactcgtgcttttatgcaccccgacacccgttttcagaaagggtgacgtgtgacaacgaaattgcgcgaaaccaccccaaacatgagttttgtacctaaagtagtggattgggcatgttcgttgcgaaaaacgaagaaatggttccggtggcaaaaactcgtgcttttatgcactcgacacccgttttcggaatgggtgacgtgtgacaacgaaattgcgcgaaaccaccccaaacatgagttttgtacctaaagtagtggattgggcatgttcgttgccaaaaacgaagaaatggttccggtggcaaaaactcgtgcttttatgcacccgacacccgttttcggaatgggtgacatgtgacaacgaaattgcgcgaaaccaccgcaaacatgagttttgtacctaaagtagtggattgggcatgttcgttgcgtaaaacgaataaatggttccggtggcaaaaactcgtgctttgtatgcaccacgacacccgttttcgaaatgggtgacgtgcgacaacgaaaatcaggggtgta

SEQ ID NO: 576 - DNA, 1181 bp, Zea mays
  source: /note="Zea mays BAC clone full insert sequence contig bacm.pk007.b16.fis10"
tccatgttgtgcttgaacattccaatccgagcccgcatctgaccgtggtgaccgtcacaagttggtgttcttctgcagtccgaatccagcatgttcaaatccttttccctttcggtcttctccctgattcctaagcaaaacaagagtgcacgggtctccatggtctaaatatgatggacatgaactcaagagtgtaatcacttgatggttgagttgacgagcacgagcgcgagtaatgggaccagaaattggtacttgtattggtatagatgcatcagtagtgtggatgtcttcatcactcggtttgtggcgtgatcaaatgggagatggtggcggcgctaggatttgaatggtggaagaacacaatgcaaccagcaacaaggaaacgcgaaagcacacaaattcaacaatgcagattattgaaagaaagtgcgaggctcaaaagggtgctgggataagatctaacctgaatttttatgtggttttgtggactgtaggaaaaaaaacgctcgataaactcaccgatcaacctggaaatctgataccaattgatgtagctgaggtgcccgatctttcggcgagtagagataattccgatttggcggaagatgacccttgcgatccgactacgacgagcaagcccgaggcgccaatgcaatcgcttaaccaactccctgtggttaccgaccttgctgatgcgagatcggcctgatcacgaagatcgtttcctgtgcgcaatcgaagaacgaacaagaacaagatgcgagcaatctaatctattactcgagggtggagttctgaatacacgaagacagcgcagatttgcgcgtgttcgagagtagctaaggctaacgtaaaacaaaactcgagaataaaggaggcgcagctcctggataaatagagggggcgcagcccctaggggcggccaaccctaggtcgtccactatgggccgcagttgggctggtcgtctattcttctgggccctcattctttagtagcatgacgaagttaagatctcttgcacgggcccgagtgattggcccagctaatgaaggaagtggcgcttgatgtggaggtgctgctggtgtagtcgtactcatagtgatgtcctcatcagtcgttctccaacaagttttccaccaccatcatctctcatcgaaagatcgggcacccttctacc

SEQ ID NO: 577 - DNA, 3892 bp, Zea mays
  source: /note="Zea mays BAC clone full insert sequence contig bacm.pk007.b16.fis11"
cgaaattgcgtgaaaccaccccaaacatgagttttggacctaaagtagtggattgggcatgttcgttgcgaaaaacgaagaaatggttccagtggcaaaaactcgtgcttttatgcactcgacacccgttttcggaatgggtgacgtgcgacaacgaaattgtgcgaaaccaccccaaacatgagttttggacctaaagtagtggattgggcatgttcgttacgaaaaacgaagaaatggttccggtggcaaaaactcgtgctttgtatgcaccccgacaaccgtttttagaatgggtgacgtgcggcaacaaaattgcgtgaaaccaccccaaacatgagttttgtacctaaagtagtggattgggcatgttctttgcgaaaaacaaaaaaatggttccggtggcaaaaactcgtgctttgtatgcccccccaccccctttttcagaatgggtgacgtgcgacaacgaaattgcgtgaaaccaccccaaacatgagttttggacctaaagtagtggattgggcatgttcgttgcgaaaaacgaagaaatggttccggtggcaaaaattcgtgcttttatgcactcgacacccgttttcggaatgggtgacgtgcggaaacgaaattgcgcgaaaccaccccaaacatgagttttggacctaaagtagtggattgggcatgtttgttacgaaaaacgaagaaatggttccggtggcaaaaactcgtgcttttatgcacccgacacacgttttcagaatgggtgacgtgtgacaacgaaattgcgcgaaaccaccccaaacatgagttttgtacctaaagtagtggattaggcatgttcgttgcgaaaaacgaagaaatggttccggtggcaaaaactcgtgctttgtatgcacccgacacccgttttcggaatgggtgacgtgcggcaacgaaattgtgcgaaaccaccccaaacatgagttttggacctaaagtagtggattgggcatgttcgttgcgaaaaacgaagaaatggttccggtggcaaaaactcgtggtttgtatgcaccccgacacccgttttcggaatgggtgacgtgcgacaacgaaattgcgcgaaaccaccccaaacatgagttttggacctaaagtagtggattgggcatgttcgttgcgaaaaacgaagaaatggttccggtggcaaaaactcgtgctttgtatgcacccgacacccgttttcggaatgggtgacgtgcggcaacgaaattgcgcgaaaccaccccaaacatgagttttggacctaaagtagtggattgggcatgttcgttgcgaaaaacgaagaaatggttccggtggcaaaaactcttgctttgtatgcacctgacacccgttttcaaaatgggtgacgtgcgacaacgaaattgtgggaaaccaccccaaacatgagttttggacctaaagtagtggattgggcatgttcgttacgaaaaacgaagaaatggttccggtggcaaaaactcgtgctttgtatgcaccccgacaaccgttttcagaatgggtgacgtgcggtaacaaaattgtgcgaaaccaccccaaacatgagttttgtacctaaagtagtggattgggcatgtccgttgcgaaaaacgaagaaatggttccgatggcaaaaactcgtgctttgtatgcaccccgacacccgttttcggaatgggtgacgtgcgacaacgaaattgcgcgaaaccaccccaaacatgagttttggacctaaagtagtggattgggcatgttcgttgcgaaaaacgaagaaatggttccggtggcaaaaactcgtgcttttatgcactcgacacccgttttcggaatgggtgacgtgcggaaacaaattgcgcgaaaccaccccaaacatgagttttggacctaaaatagtggattgggcatgttcgttgcgaaaaacgaagaaatggttccggtggcaaaaacttgtgcttttatgcacccgacacccgttttcggaatgggtgacatgtgacaacgaaattgcgcgaaaccaccccaaacatgagttttgtacctaaagtagtggattgggcatgttcgttgcgtaaaaagaagaaatggttccggtggcaaaaacttgtgctttgtatgcaccccgacacccgttttcggaatgggtgacgtgcgacaacgaaattgtgcgaaaccaccccaaacatgagttttgtacctaaagtagtggattgggcatgttcgttgcgaaaaacgaagaaatggttccggtggcaaaaactcgtgctttgtatgcacccgacacccgttttcggaatgggtgacgtgcgacaacgaaattgcgcgaaaccaccccaaacatgagttttggacctaaagtagtggattgggcatgttcgttgcgaaaaacgaagaaatggttccggtggcaaaaactcgtgctttgtatgcacccgacacccgttttcagaatgggtgacgtgcggcaacgaaattgtgcgaaaccaccccaaacatgagttttggacctaaagtagtggattgggcatgttcgttgcgaaaaacgaagaaatggttccggtggcaaaaactcgtggtttgtatgcaccccgacacccgttttcggaatgggtgacgtgcgacaacgaaattgcgcgaaaccaccccaaacatgagttttggacctaaagtagtggattgggcatgttcgttgcgaaaaacgaagaaatggttccggtggcaaaaactcgtgctttgtatgcacccgacacctgttttcggaatgggtgacgtgcgacaacgaaattgcgcgaaaccaccccaaacatgagttttggacctaaagtagtggattgggcatgttcgttgcgaaaaacgaagaaatggttccggtggcaaaaactcgtgcttttatgcacccgacacccgttttcggaatgggtgacgtgcggcaacgaaattgcgcgaaaccaccccaaacatgagttttggacctaaagtagtggattgggcatgttcgttgcgaaaaacgaagaaatggttccggtggcaaaaactcgtgcttttatgcacccgacacccgttttcggaatgggtgacgtgcgacaacgaaattgtgcgaaaccatccaaacatgagttttggacctaaagtagtggattgggcatgttcgttacgaaaaacgaagaaatggttccggtggcaaaaactcgtgctttgtatgcaccccgacaaccgttttcagaatgggtgacgtgcggtaacaaaattgtgcgaaaccaccccaaacatgagttttgtacctaaagtagtggattgggcatgtccgttgcgaaaaacgaagaaatggttccggtggcaaaaactcgtgctttgtatgcaccccgacacccgttttcggaatgggtgacgtgcgacaacgaaattgcgcgaaaccaccccaaacatgagttttggacctaaagtagtggattgggcatgttcgttgcgaaaaacgaagaaatggttccggtggcaaaaactcgtgcttttatgcactcgacacccgttttcggaatgggtgacgtgcggaaacgaaattgcgcgaaaccaccccaaacatgagttttggacctaaaatagtggaattggcatgttcgttgtgaaaaacgaagaaatggttccggtggcaaaaacttgtgctttgtatgcaccccgacaaccgttttcagaatcggtgacgtgcggcaacgaaattgcgcgaaaccaccccaaacatgagttttgtacctaaagtagtgaattgggcatgttcgttgcgaaaaacgaagaaatggttccggtggcaaaaactcgtgcttttatgcacccgacacccgttttcggaatgggtgacgtgcgacaacgaaattgtgcgaaacca

SEQ ID NO: 578 - DNA, 3833 bp, Zea mays
  source: /note="Zea mays BAC clone full insert sequence contig bacm.pk007.b16.fis12"
gccagtgattctgaggaaactagtcatgctatgattgccactaaccatgcagaaaatgaggaagtccacgttgatcccatcgacgccgataggtatgagagtcttgttgtgcagcgtgttctcagcacacaggttgcccaggccgaaaaaaatcagcgacacactctattccataccaagggcgtcgtgcacgaacggtcgattcgcatcatcatcgatagtggcagctgcaacaatttggcaagtatagcgttggtagagaaattatccttgcccactcgcacacatccacatccgtatcacattcaatggcttaatgatggtggtaaaataaaggtaacacgttcggtacatgtccccttttcgctgggttcttattctgattatgctgattgcgatgttattcctatggaagcatgctctttgttattgggtcgaccttggcaatatgatactgatagtttacatcatggtcgttcaaatcattattctttcatgtttaaaggccagaaaataattatacatccaatgacccctgaccaaattttgaaagatgatcttactagggctgctaaaactgcacaacaagtcaaatcgacatcagccgcacctattaaatctgaaatcaagttgcactctcctgttttacttgctacacgtgctgattttgatgatctccatgaagctcatatgccctgttatgcacttgtatgctcgcgcatgcttgttccgcttgatgatgcaccgtctttggatataccccctgctgttgttaaccttttgcaggagtatgctgatgtttatcctacggaattaccaccgggtcttcctcccctccgtggcattgagcatcagatcgatctcatccccggcgcttctcttccgaaccgcgccccgtaccgtacaaatccagaggagacgaaggagatccagcgccaggtgcagacgcttcttgataagggttacattcgtgagtctcttagcccttgctcggttcctgttttactcgttccaaagaaagatgggtcatggcgtatgtgcgtagattgtcgtgctattaataacatcacagttcgttatcgatatcctattccacgccttgatgatatgttagatgagcttagtggtgccgttattttctctaaggttgatttgcgtagcggttaccatcagattagaatgaaactcggtgatgaatggaaaacggcttttaaaacgaaatttggtttatatgaatggttggttatgccatttggattgactaatgctcccagcacctttatgcgtttaatgaacgaagttctacgggccttcataggtttgtttgttgttgtttatttcgatgatatccttatttatagcaagtctatagaggagcatttagaacatttgcatgctgtttttgatgctttgcgtgctgctcgcttgtttggtaacatggaaaagtgcacattttgcacgcaacgtgtctcgtttcttggttatgtggttactccgcagggcattgaggtggatagcagcaagattgctgccattcgggagtggcctacaccgacgacggtcacacaaattcggagctttcttggacttgccggtttctaccgcagatttgttcgtgattttagctccattgcagcgcctctacatgagcttacaaagaaagatgtgccgtttgcttggagtgattcgcaggaggtagcgttcagcactttgaaagataagttaacccaagctcccctcttgcaattgcctaattttaataaagtttttgagcttgaatgcgatgctagcggtattgggctaggtgctgttttgttacaagaaggaaaaccagttgcttattttagtgaaaaattaagcggtgctagtctgaaatattctacttatgataaagagctttacgctttagtgcgcactttgcatacatggcagcactatctttggcatcgtgcgttcataattcattctgatcatgaggctttaaaacatattcgtacccaaacaaatctgaaccgtcgtcatgctaaatgggtcgaattcattgagtcctttccttacattattaaacacaagaacgcgaaggacaatgttattgctgatgctttgtctcgtataccatgctgtcacaattagattttaaaatctttggtttggacactgtgaaggatcaatatgttgacgatgctgattttaaagatgctttcggccattgtattaatgggataccatggggcaaatttcacatacaagatgggttcttgtttcgcgctaacaagttgtgtgttccagctagttcggtttgtcttttgttgttacaggaggcacatggaggcggtctcatggggcattttggcgtctacaaaacgcatgaggtgttggctgcccacttcttttggcctcggatgcgcgctgatgttgagcgccttgttgcacgctgcactacttgtcagaaagctaagtcacggttgaacaaccatggtttgtatatgcctttgcctgtcccttcttctccttggcttgatatctctatggactttgttttgagcttgcctagaactaagaaggggagggatagtatttttgtggttgttgatagattctctaaaatggctcactttataccttgtcataaaactgatgatgctagcattgttgttgaattgttctttagagaaattattcgtttacatggtattccaaaaacaatagtctctgatcgcgatgctaagtttctaagccatttttggagatctctttggaataaattgggaactaaattgttgtttagcactacttgtcaccctcagactgatggacaaactgaggtagtaaatagaactttatctaccatgcttagggctgttttagacaagaatttgagacgttgggaggattgcttgcctcatgttgaatttgcttacaatcatgccacgcattcttctacaaagatgtgccctttccagattgtttatggttacattcctagggcacctattgatttgatttcacttaatgctgcgaacgccccacatgtagatgcttctgcacatgttgaacaaatgattaccatacatgaacaaacgaaacagaacattgctgctactaatgcaaaaaatcaggttgctggtagtaaaggaagaaaacatgttacttttgaacctggtgatatgtttggttgcatttgagaaaggatcgttttcctacttttgcgtcgttctaaattaatgcctcgtgctgctggtccttttaaggtgctaacaaagattaatgataatgcttatatccttgacctgcctgcggaatttggtgtttccactagttttaatgttgcagatttgaaaccatatatggccgaggatgaggagttgtcgtcgaggacgacttcacttcaagaaggggaggatgatgaggacatcactatgagtacgactacaccagcagcacctccacatccaagcgccacttccttcattagctgggccaatcactcgggcccgtgccagagatcttaacttcgtcatgctactgaagaatgagggcccagaagaatagacgaccagcccaactgcggcccatagtggacgacctagggttggccgcccctaggggctgcgccccctctatttatccaggagctgcgcctcctttattctcgagttttgttttatgttagccttagctactctcgaacacgcgcaaatctgcgctgtcttcgtgtattcagaactccaccctcgagtaatagattagattgctcgcatcttgttcttgttcgttcttcgattgcgcacaggaaacgatcttcgtgatcaggccgatctcgcatcagcaag

SEQ ID NO: 579 - DNA, 2978 bp, Zea mays
  source: /note="Zea mays BAC clone full insert sequence contig bacm.pk007.b16.fis13"
tctaaatccaaagcgggaggtcgacggtatcttctccttgatcgcgcaatttcgttgtcgcacgtcacccattccgaaaacaggtgtcgggtgcatacaaagcacgagtttttgccaccggaaccatttcttcgtttttcgcaacgaacatgcccaatccactactttaggtccaatactcatgtctggggtggtttcgcgcaatttcgttgtcgcgcgtcacccattccgaaaacgggtgtcgtggtgcatacaaagcacgagtttttgccaccggaaccatttattcgttttacgcaacgaacatgcccaatccactactttaggtacaaaactcatgtttgcggtggtttcgcgcaatttcgttgtcacatgtcacccattccgaaaacgggtgtcgggtgcataaaagcacgagtttttgccaccggaaccatttcttcgtttttcgcaacgaacatgcccaatccactactttaggtacaaaactcatgtctggggtggtttcgcgcaatttcgttgtcacatgtcacccattccgaaaacgggtgtcgggtgcataaaagcacgagtttttgccaccagagccatttcttcgtttttcgcaacgagcatgcccaatccactattttaggtccaaaactcatgtttggggtggtttcgcgcaatttcgttttcgcacgtcacccattccgaaaacgggtgtcgggtgcatataaagcacgagtttttgccaccggaacaatttcttcgtttttcgtaacgaacatgcgcaatccactactttaggtccaaaactcatgtttggggtggtttcgcgcaatttcgtttccgcacgtcacccattccgaaaacgggtgtcgggggtgcatacaaagcacgagtttttgccaccggaaccatttcttcgtttttcgcaaagaacatgcccaatccactactttaggtccaaaactcatgtttggggtggtttcgcgcaatttcgttgtcgcacgtcacccattccgaaaacgggtgtcgggtgcatacaaagcacggatttttgccaccggaaccatttcttcgtttttcgcaacgaacatgcccaatccactactttaggtccaaaactcatgtttggggtggtttcgcgcaatatcgttgtcgcacgtcacccattccgaaaacgggtgtcgtggtgcatacaaagcacgagtttttgccaccggaaccatttcttcgtttttcgcaacgaacatgcccaatccactactttaggtacaaaactcatgtttggggtggtttcgcgcaatttcgttgtcacacgtcacccattctgaaaacgggtgtcgggtgcataaaagcacgagttttagccaccggaaccatttcttcgtttttcgtaacgaacatgcccaatccacaactttaggtccaaaactcatgtttggggtggtttcgcgcaatttcgttgtcgcacgtcacccattccgaaaacgggtgtcggggtgcatacaaagcacgagtttttgccaccggaaccatttcttcgtttttcgcaacgaacatgcccaatccactactttaggtacaaaactcatgtttggggtggtttcgcgcaattttgttgccgcacgtcactcattccgaaaacgattgtcgggtgcataaaagcacgagtttttgccaccggaaccatttcttcgttttttcgtaacgaacatgcccaatccactactttaggtccaaaactcatgtttggggtggtttcgcacaatttcgttgtcacacgtcacccattccaaaaacgggtgtcgggtgcatacaaagcacgagtttttgccaccagaaccatttctttgtttttcgcaacgaacatgcccaatccactactttaggtccaaaactcatgtttggggtggtttctcgcaatttcgttgtcgcacgtcacccattccgaaaacgggtgtcgggtgcatacaaagcacgagtttttgccactggaaccatttcttcgtttttcgcaacgaacatgcccaatccactactttaggtccaaaactcatgtttggggtggtttcgtgcaatttcattgtcgcacgtcacccattccgaaaacgggtgtcgggtgcatacaaaccacgagtttttgccaccggaaccatttattcgtttttcgcaacgaacatgcccaatccactactttaggtccaaaactcatgtttggggtggtttcgcgcaatttcgttgccgcacgtcatccattccgaaaacggttgtcgggggtgcatacaaagcacgagtttttgccaccggaaccatttcttcgttttcctcaacgaacatgcccaatccactactttaggtacaaaactcatgtttggggtggtttcacgcaatttcgttgtcacacgtcacccattccgaaaacgggtgtcgggtgcatacaaagcacgagtttttgccagcagaaccatttcttcgtttttcgcaacgaacatgcccaatccactactttaggtccaaaactcatgtttggggtggtttctcgcaatttcgttgtcgcacgtcacccattccgaaaacgggtgtcgggtgcataaaagcacgagtttttgccaccggaaccatttcttcgtttttcacaacgaacatgcccaatccactactttaggtacaaaactcatgtttggggtgtgatgaggacatcaacaccaacacgagcacatctacaccagcagcagcttctccagcccaggcaccatcttccccagtccaggcgccaccccttccacctgggccagtgactcgggcccgtgcaagagaattgaactacatcatgttgttaaagaacgaaggcccggaagaatagacgaccagcccaattgcggcccataatggacgacctagggttggccgcccctaggggctgcgccccctctctatttatacaggagctgcgccctcctttattttccaagttttgttttacattagct

SEQ ID NO: 580 - DNA, 3889 bp, Zea mays
  source: /note="Zea mays BAC clone full insert sequence contig bacm.pk007.b16.fis14"
tgaccgcgtatagactcctatagggcgaattgggttcaaatccaccgggggaggtcgacggtatcttttccttgatttctgaaaacgggtgtcgggtgcataaaagcacgagtttttgccaccggaaccatttcttcgtttttcgtaacgaacatgcccaatccactactttaggtccaaaactcatgtttggggtggtttcgcgcaatttcgttgtcgcacgtcacccattccgaaaacgggtgtcgggtgcatacaaagcacgagtttttgccaccggaaccatttcttcgtttttcgcaacgaacatgcccaatccactactttaggtccaaaactcatgttgggggtggtttcgcgcaatttcgttgtcgcacgtcacccattccgaaaacgggtgtcgtggtgcatacaaagcacgagtttttgccaccggaacaatttcttcgtttttctcaacgaacatgcccaatccactactttaggtacaaaactcatgtttggggtggtttcgcgcaatttcgttgtcacacgtcacccattccgaaaacgggtgtcgggtgcataaaagcacgagtttttgccaccggaaacatttcttcttttttctcaacgaacatgcgccatcccctactttttgtgtacaaaacacgtttggggggggttcgcgcaatttcgttgccgcacgtcacccattccgaaaacggttgtcggggtgcatacaaagcatgagtttttgccaccggaaccatttcttcgtttttcgaaagaacatgcccaatccactactttaggtccaaaactcatgtttggggtgatttcttgcaatttcgttgtcgcacgtcacccattccgaaaacgtgtgtcgggtgcatacaaagcacgagtttttgccaccggaaccgtttcttcattttttgcaacgaacatgcccaatccactactttaggtccaaaactcatgtttggggtggtttctcgcaatttcgttgtcgcacgtcacccattccaaaaacgggtgtcgggtgcatacaaagcacgagtttttgccaccgaaaccattttttcgttttttgcaacgaacatgcccaatccactactttaggtccaaaactcatgtttggggtggtttcgcgcaaattcgttgccgcacgtcacccattccgaaaacggttgtcgagggtgcatacaaagcacgagtttttgccaccggaaccatttcttcgtttttcgcaacgaacatgcccaatccactactttaggtacaaaactcatgtttggggtggtttcgcgcaatttcgttgtcacacgtcacccattccgaaaacgggtgtaggggggtgcatacaaagcacgagtttttgccaccggaaccatttcttcgtttttcgtaacgaacatgcccaatccactactttaggtccaaaactcatgtttggggtggtttcgcgcaatttcgttgtcgcacgtcacccattccgaaaacgggtgtcgggtgcatacaaaccacagatttttgccaccggaaccatttcttcgtttttcgcaacgaacatgcccaatccactactttaggtacaaaactcatgtttggggtggtttcgcgcaatttcgttgtcgcacgtcacccattccgaaaacgggtgtcgtggtgcatacaaagcacgagtttttgccaccggaaccatttcttcgtttttcgcaacgaacatgcccaatccactaatttaggtacaaaactcatgtttggggtggtttcgcgcaatttcgttgtcacacgtcacccattccgaaaacgggtgtggggtgcataaaagcacaagtttttgccaccggaaccatttcttcgtttttcgcaacgaacatgcccaatccactactttaggtccaaaactcatgtttggggtggtttcgcgcaatttcgttgtcgcacgtcacccattccgaaaacgggtgtcgtggtgcatacaaagcacgagtttttgccaccggaaccatttcttcgtttttcgcaacgaacatgcccaatccactactttaggtacaaaactcatgtttggggtggtttcgcgcaatttcgttgtcacacgtcacccattctgaaaacgggtgtcgggtgcataaaagcacgagtttttgccaccggaaccatttcttcgtttttcgtaacgaacatgcccaatccactactttaggtccaaaactcatgtttggggtggtttcgcacaatttcgttgccgcacgtcacccattctgaaaacgggtgtcgggtggttacaaagcacgagtttttgccaccggaaccatttcttcgtttttcgcaacgaacatgcccaatccactactttaggtccaaaactcatgtttggggtggtttcgcgcaatttcgttgtcgcacgtcacccattccgaaaacgggtgtcgagtacatacaaagcacgagtttttgccaccggaaccatttcttcgtttttcgcaacgaacatgcccaatccactactttaggtccaaaactcatgtttggggtggtttcgcgcaatttcgttgtcgcacgtcacccattccgaaaacgggtgtcggggtgcatacaagcacgagtttttgccaccggaacaatttcttcgttttacgcaacgaacatgcccaatccactactttaggtacaaaactcatgtttggggtggtttcgcgcaatttcgttgtcccatgtcacccattccgaaaacgggtgtcgggtgcataaaagcacgagtttttgccaccggaaccatttctttgtttttcgcaacgaacatgcccaatccactactttaggtccaaaactcatgtttggggtggtttcgcgcaatttcgttgtcgcacgtcacccattccgaaaacgggtgtcggggtgcatacaaaccacgagtttttgccaccggaaccatttcttcgtttttcgcaacgaacatgcccaatccactactttaggtccaaaactcatgtgtggggtggtttcgcgcaattttgttgtcgcgcgtcacccattctgaaaacgggtgtcgtggtgcatacaaagcacgagtttttgccaccggaaccatttattcgttttacgcaacgaacatgcccaatccactactttaggtacaaaactcatgtttaaggtggtttcgcgcaatttcgttgtcacatgtcacccattccgaaaacgggtgtcgggtgcataaaagcacgagtttttgccaccggaaccatttcttcgtttttcgcaacgaacatgcccaatccactactttaggtacaaaactcatgtttggggtggtttcgcgcaatttcgttgtcacatgtcacccattccgaaaacgggtgtcgggtgcataaaagcacgagtttttgccaccggaaccatttcttcgtttttcgcaacgaaaatgcccaatccactactttaggtacaaaactcatgtttggggtggtttcgcgcaatttcgttgtcacacgtcacccattctgaaaacgggtgtcgggtgcataaaaacacgaatttttttcccccgaaacattttttttttttttttaacaaacatgtcccatccactactttaggtccaaaaatcatgtttggggtggtttcgcgcaatttcgttttcgcacgtcacccattccgaaaacaggtgtcgagtgcataaaaacacgaatttttttcccccgaaaaaatttttcttttttttcaacgaacaagccccaaccactacttttgggccaaaaaacacgtttgggggggtttctcccaaaattcttgtctcacgtcgcccctttccaaaaaaggtgttggggggggaacaaagccaaagtttttgcacccgaaaaatttttttttttttttaaaaagaaagcccaaatccaaa

SEQ ID NO: 581 - DNA, 4111 bp, Zea mays
  source: /note="Zea mays BAC clone full insert sequence contig bacm.pk007.b16.fis15"
tcaaatcaacaacgggaggtcgacggtatcgatttcctgatcaaaactcatgtttggggtggtttcgcgcaatttcgttgtcgcacgtcacccattccgaaaacgggtgtcgtggtgcatacaaagcacgagtttttgccaccggaaccatttcttcgttttacgcaacgaacatgcccagtccactactttaggtacaaaactcatgtttggggtggtttcgcgcaatttcgttgtcacatgtcacccattccgaaaacgggtgtcgggtgcataaaagcacgagtttttgccaccggaaccatttctttgtttttcgcaacgaacatgcccaatccactactttaggtccaaaactcatgtttggggtggtttcgcgcaatttcgttgtcgcacgtcacccattccgaaaacgggtgtcggggtgcatacaaaccacgagtttttgccaccggaaccatttcttcgtttttcgcaacgaacatgcccaatccactactttaggtccaaaactcatgtttggggtggtttcgcacaatttcgttgtcacacgtcacccattctgaaaacgggtgtcgggtgcatacaaagcacgagtttttgccaccggaaccatttcttcgtttttcgcaacgaacatgcccaatccactactttaggtccaaaactcatgtttggggtggtttcgcgcaatttcgttgtcgcacgtcacccattctgaaaacgggtgtcgggtgcatacaaagcacgagtttttgccaccggaaccatttttttgttttttgcaacgaacatgcccaatccactactttaggtacaaaactcatgtttgggggggtttcgcgcaattttgttgtcgcacgtcacccattccgaaaacgggtgtcggggtgcatacaaagcacgagtttttgccaccggaaccatttcttcgtttttcgcaacgaacatgcccaatccactactttaggtacaaaactcatgtttggggtggtttcgcgcaatttcgttgtcgcacgtcacccattccgaaaacgggtgtcgtggtgcatacaaagcacaagtttttgccaccggaaccatttcttcgttttacgcaacgaacatgcccaatccactactttaggtacaaaactcatgtttggggtggttttgcgcaatttcgttgtcacatgtcacccattccgaaaacgggtgtcgggtgcataaaagcacgagtttttgccaccggaaccatttcttcgtttttcgcaacgcacatgcccaatccactactttaggtccaaaactcatgtttggggtggtttcgcgcaatttcgtttccgcacgtcacccattccgaaaacgggtgtcgagtgcataaaagcacgagtttttgccacctgaaccatttcttcgtttttcgcaacgaacatgcccaatccactactttaggtcctaaactcatgtttggggtggtttcgcgcaattttgttgtcgcacgtcacccattccgaaaacgggtgtcgtggtgcatacaaaccacgagtttttgccaccggaaccatttcttcatttttcgcaacgaacatgcccaatccactactttaggtacaaaactcatgtttggggtggtttcgctcaatttcgttgtcacacgtcacccattctgaaaacgggtgtcgggtgcataaaagcacgagttttagccaccggaaccatttcttcgtttttcgtaacgaacatgcccaatccactactttaggtccaaaactcatgtttggggtggtttcgcacaatttcgttgccgcacgtcacccattctgaaaacgggtgtcgggtgcatacaaagcacgagtttttgccaccagaaccatttcttcgtttttcgcaacgaacatgcccaatccactactttaggtccaaaactcatgtttggggtggtttcgcgcaacttcgttgtcgcacgtcacccattccgaaaacgggtgtcgggtgcatacaaagcacgagtttttgccaccggaaccatttcttcgtttttcgcaacgaacatgcccaatccactactttaggtccaaaactcatgtttggggtggtttcgcgcaatttcgttgtcgcacgtcacccattccgaaaacgggtgtcggggtgcatacaaaccacgagtttttgccaccggaaccattcccccttttttcgcaacaaacatgcccaatccactactttaggtccaaaactcatgtttggggtggtttcgcacaatttcgttgccgcacgtcacccattctaaaaacgggtgtcgggtgcatacaaagcacgagtttttgccaccggaaccatttcttcgtttttcgcaacgaacatgcccaatccactactttaggtacaaaactcatgtttggggtggtttcgcgcaatttcgttgtcacacgtcacccattccgaaaatgggtgtagggggtgcatacaaagcacgagtttttgccaccggaaccatttcttcgtttttcgcaacgaacatgcccaatccactactttaggtccaaaacacatgtttggggtggtttctcgcaatttcgttgtcgcacgtcacccattccgaaaacgggtgtcgggtgcatacaaagcacgagtttttgccaccggaaccatttcttcgtttttcgcaacaaacatgcccaatccactactttaggtacaacactcatgtttggggtggtttcgcgcaatttcgttgccgcacgtcacccattccgaaaacgggtgtcgggtgcataaaagcacgagtttttgccaccggaaccatttcttcgtttttcgcaacgaacatgcccaatccactactttaggtccaaaactcatgtttggggtggtttcgcgcaatttcggtgccgcacgtcacccattctgaaaacagttgtcggggtgcatacaaagcacgagtttttgccaccagaaccatttcttcgtttttcgcaacgaacatgcccaatccactactttaggtacaaaactcatgtttggggtggtttcgcgcaatttcgttgccgcacgtcactcattccgaaaacgagtgtcgggtgcataaaagcacgagtttttgccaccggaaccatttcttcgtttttcgtaacgaacatgcccaatccactactttaggtccaaaactcatgtttggggtggtttcgcgcaatttcgttgccgcacgtcactcattctgaaaacggttgtcggggtgcatacaaagcacgagtttttgccaccggaaccatttcttcgtttttcgcaacgaacatgcccaattcactactttaggtccaaaactcatgtttggggtggtttcgcgcaatttcgttgccgcacgtcacccattctgaaaacggttgtcggggtgcatacaaagcacgagtttttgccaccggaacgatttcttcgtttttcacaacgaacatgcccaatccacttgatgaagctgaggtgcccgatctttcggcgagtagagataattccgatttggcggaagatgacccttgcgatccgactacgacgagcaagcccgaggcgccaatgcaatcgctgaaccaactccctatggttaccgaccttgctgatgcgagatcggcctgatcacgaagatcgtttcctgtgcgcaatcgaagaacgaacaagaaaaagaagcgagcaatctaatctattactcgagggtggagttctgaatacacaaagacagcgcagatttgcgcgtgttcgagagtagctaaggctaacgtaaaacaaaactcggaaaataaaggaggcgcagctcctgaataaatagagagggggcgcagcccctaggggcggccaaccctaggtcgtccattatgggccgcaattgggctggtcgtctattcttccgggccttcgttctttaacaacatgatgtagttcaattctcttgcacgggcccgagtcactggcccaggtggaaggggtggcgcctgggctggagaaggtgctgctggtgtagatgttctcgtgttggtgttgatgtccgcatcatcctccccttcttgaactgaagtcgtcctcgacggcaactcctcatcttctcccgcatacggtttcaaatctgcaatcaaggtggtga

SEQ ID NO: 582 - DNA, 2657 bp, Zea mays
  source: /note="Zea mays BAC clone full insert sequence contig bacm.pk007.b16.fis16"
gaaaataagtcattagggggatgacgaaccacacggcgtgcacgaccacggcgatctccatcgtcccactcagtgtcaccgccgtagtcctgctccatctttgtggtcaacgcatcaaggcgtgccaggatggagtcgagtgtggtgcgagtcgccgtttgagcaaggtcaagctggttgaaacgctcggtcgtcgaagtgaccgttgaatcaagccgttcatgcatcgtcctaatgtcatcagcaagtccatcaacttgtccctttacttccagcaactgggcatccaccgtgtcatgtgctcctgccatagttagcgcaaacaccaaaacaccaaaaaacgacaaaaacaggggtgtactgctcacaaggcgctcacactagtgctgttatcaaattcttatccgttcttaccaagccacagtggtgaactgcaaccaacaggtggaaccggtgaaagattggatgagcgattgcctggagaaacagaaacctactcgtcgtagaaatatgtggagttctgggtaggctgcactcaagtcaaggattagcacgaccaaacaataatgcaaagttgaattatagtgcaaaacacgaaactatattgctggccacaagtgcaaaggacggatggaactagtagaatggtagtaccgtaaatattgtactagcgaggccactagtaggaatcacaagtgattttgtttttcttttttgtatgatttttttgatatttttctcagcacaagaagcaacaaaataggagctacacgaagtttcacctaaaacagagttcaaatgtggtctacagaaaatcaggaagttctctgaaaagcgtgcgagaactttgacaaatttttttctttattttcctgaatttttttgacaattttgtcgaacccaaacagaccgaaggtaagtttggccggcctcagaatggtgtcaactagctcctgtaaaaatttcagatttttcggacacccgagcgaaaagttatgcccggtttaaggaaggtacctcaagttatgttttcaaacgaccgggatgaaacaaccgtatcctttctccttcgttgttttttttgtttctgttttttttttgacgtaaccgaaggagaaaaacaaggaaacgatgttgcctcggtttttttctgtttttttttcgtaaccgaaggagaaaaacaaggaaacgaccgttgactcggtttgttttttctgtttttttttgacgtaaccgaaggagaaaaacaaggaaacaatgttgactcggtttgtggcgtgatcaaaggggagatggtggcggcgctaggatttgaatggtggaagaacacaatgcaaccagcaacaaatgacgcgaaagcacacaaattcaacaatgcagattattgaaagaaagtgcgaggctcaaaagggtgctgggataaggtctaacctgaatttttatgtggttttgtggactgtaggaaaaaaaacactcgataaactcaccgatcaacctggaaatctgataccaattgatgtagctgaggtgcccgatctttcggcgagtagagataattccgatttggcggaagttgacccttgcgatccgactacgacgagcaagcccgaggcgccaatgcaatcgctgaaccaactccctgtggttaccgaccttgctgatgcgagatcggcctgatcacgaagatcgtttcctgtgcgcaatcgaagaacgaacaagaaaaagatgcgagcaatctaatctattactcgagggtggagttctgaatacacgaagacagcgcagatttgcgcgtgttcgagagtagctaaagctaatgtaaaacaaaactcggaaaataaaggaggcgcagctcctgtataaatagagagggggcgcagcccctaggggcggccaaccctaggtcgtccattatgggccgcaattgggctggtcgtctattcttccgggccttcgttctttaacaacatgatgtagttcaattctcttgcacgggcccgagtcactggcccaggtggaaggggtggcgcctggactggggaagatggtgcctgggctggagaagctgctgctggtgtagatgtgctcgtgttggtgttgatgtcctcatcacaccccaaacatgagttttgtacctaaagtagtggattgggcatgttcgttgtgaaaaacgaagaaatggttccggtggcaaaaatttgtgtttttatgcactcgacacccgtttttcgaatgggtgacgtgcggaaaagaaattttgggaaacccccccaaacatgagttttggacctaaagtagtggattgggcatgtttgttgggaaaaaagaagaaatggttcccgtggcaaaaaatcgtgctttgtatgcaccccgacacccgttttcagaatgggtgacgtgcgacaacgaaattgcgcgaaaccaccccaaacatgagttttggacctaaagtagtggattgggcatgttcgttgcgaaaaacgaaaaatggttccggtggcaaaaactcgtgctctgtatgcaccccgacacccgttttcggaatggatgacgtgcgataacgaaattgcgcgaaaccaccccaaacaagagttttggacctaaagtagtggattgggcatgttcgttgcgtaaaacgaagaaatggttccggtggc

SEQ ID NO: 583 - DNA, 6740 bp, Zea mays
  source: /note="Zea mays BAC clone full insert sequence contig bacm.pk007.b16.fis17"
cattctgaaaacgggtgtcgggtgcatacaaagcacgagtttttgccaccggaaccatttcttcgttttttcgcaacgaacatgcccaatccactactttatgtccaaaactcatgtttggggtggtttcgcgcaatttcgttgtcgcacgtcacccattccgaaaacgggtgtcgggtgcatacaaagcacaagtttttgccaccggaaccatttcttcgtttttcgcaacgaacatgcccaatccactactttaggtccaaaactcatgtttggggtggtttcgcgcaattttgttttcccacgtcacccattccaaaaacgggtgtcggggtgcatacaaagcacgagtttttgccaccggaaccattttttcttttttcgcaacgaacatgcccaatccactattttaggtacaaaactcatgtttggggtggtttcgcgcaattttgttgtcacacgtcacccattccaaaaaggggtgtcgggtgcataaaagcacgagtttttgccaccggaaccatttttttgttttttgcaacgaacatgcccaatccactactttaggtccaaaactcatgtttggggtggtttcgcgcaatttcgttgtcgcacgtcacccattctgaaaacgggtgtcgtggtgcatacaaagcacgagtttttgccaccggaaccatttcttcgtttttcgcaacgaacatgcccaatccactactttaggtacaaaactcatgtttggggtggtttcgcgcaatttcgttgtcacacgtcacccattctgaaaacgggtgtcgggtgcataaaagcacgagtttttgccaccggaaccatttcttcgtttttcgtaacgaacatgcccaatccactacattaggtacaaaactcatgtttggggtggtttcacgcaatttcgttgtcacacgtcacccattccgaaaacgggtgtcgggtgcataaaagcacgagtttttgccaccggaaccatttcttcgtttttcgtaacgaacatgcccaatccactactttaggtccaaaactcatgtttggggtggtttagcgcaatttcgttgtcgcacgtcacccattccgaaaacggttgtcgtggtgcatacaaaccacgagtttttgccaccggaaccatttcttcgtttttcgcaacgaacatgcccaatccactactttaggtacaaaaatcatgtttggggtggtttcgcgcaatttcgttgtgacacgtcacccattccgaaaacgggtgtcaggtgcataaaagcacgagtttttgccaccggaaccatttcttcgtttttcgcaacgaaaatgccccatccactactttaagtccaaaactcatgtttggggtggtttcgcgcaatttcgtttccgcacgtcacccattccgaaaacgggtgtcgggggtgcatacaaagcacgagtttttgccaccggaaccatttcttcatttttcgcaacgaacatgcccaatccactactttaggtccaaaactcatgtttggggtggtttagcgcaatttcgttgtcgcacgtcacccattccgaaaacgggtgtcgtggtgcatacaaaccacgagtttttgcgaccggaaccatttcttcgtttttcgcaacgaacatgcccaatccactactttaggtccaaaactcatgtttgtggtggtttcgcgcaatttcgttgtcgcacgtcacccattccgaaaacggttgtcgggggtgcatacaaagcacgattttttgccaccggaaccatttcttcgtttttcgcaacgaacatgcccaatccactactttaggtccaaaactcatgtttggggtggtttcgcgcaatttcgttgccgcacgtcaccctttcaaaaaacgggtgtggggtgcataaaagcacgagtttttgccaccggaaccatttcttcgtttttcgcaacgaacatgcccaatccactactttaggtccaaaactcatgtttggggtggtttcgcgcaatttcgttgtcgcacgtcacccattccgaaaacaggtgtcgggtgcatacaaagcacgagtttttgccaccggaaccatttcttcgtttttcgcaacgaacatgcccaatccactactttaggtccaatactcatgtctggggtggtttcgcgcaatttcgttgtcgcgcgtcacccattccgaaaacgggtgtcgtggtgcatacaaagcacgagtttttgccaccggaaccatttattcgttttacgcaacgaacatgcccaatccactactttaggtacaaaactcatgtttgcggtggtttcgcgcaatttcgttgtcacatgtcacccattccgaaaacgggtgtcggggtgcataaaagcacgagtttttgccaccggaaccatttcttcgtttttcgcaacgaacatgcccaatccactactttaggtccaaaactcatgtttggggtggtttcgcgcaatttcgtttccgcacgtcacccattccgaaaacgggtgtcgggtgcatataaagcacgagtttttgccaccggaaccatttcttcgtttttcgcaacgaacatgcccaatccactactttaggtccaaaactcatgtttggggtggtttcgcgcaatttcgtttccgcacgtcacccattccgaaaacgggtgtcgggggtgcatacaaagcacgagtttttgccaccggaaccatttcttcatttttcgcaacgaacatgcccaatccactactttaggtccaaaactcatgtttggggtggtttagcgcaatttcgttgtcgcacgtcacccattccgaaaacgggtgtcgtggtgcatacaaaccacgagtttttgcgaccggaaccatttcttcgtttttcgcaacgaacatgcccaatccactactttggttcaaaaactcatgtttggggtggtttcgcgcaatttcgttgtcgcacgtcacccattctgaaaacggttgtcgggggtgcatacaaagcacgagtttttgccaccggaaccatttcttcgtttttcgcaacgaacatgcccaatccactactttaggtccaaaactcatgtttggggtggtttcgcgcaatttcgttgtcgcacgtcacccattccgaaaacgggtgtcgggtgcatacaaagcacgagtttttgccaccggaaccatttcttcgtttttcgcaacgaacatgcccaatccactactttaggtacaaaactcatgtttggggtggtttcgcgcaatttcgttgtcgcacgtcacccattccgaaaacgggtgtcgtggtgcatacaaagcacaagtttttgccaccggaaccatttcttcgttttacgcaacgaacatgcccaatccactactttaggtacaaaactcatgtttggggtggttttgcgcaatttcgttgtcacatgtcacccattccgaaaacgggtgtcgggtgcataaaagcacgagtttttgccaccggaaccatttcttcgtttttcgcaacgcacatgcccaatccactactttaggtccaaaactcatgtttggggtggtttcgcgcaatttcgtttccgcacgtcacccattccgaaaacgggtgtcgagtgcataaaagcacgagtttttgccaccggaaccatttcttcgtttttcgcaacgaacatgcccaatccactactttaggtccaaaactcatgtttggggtggtttcgcgcaatttcgttgtcgcacgtcacccattccgaaaacgggtgtcgtggtgcatacaaagcacgagtttttgccaccggaaccatttcttcgttttacgcaacgaacatgcccaatccactactttaggtacaaaactcatatttggggtggtttcgcgcaatttcgttgtcacatgtcacccattccgaaaacgggtgtcgggtgcataaaagcacgagtttttgccaccggaaccatttcttcgttttacgcaacgaacatgcccaatccactactttaggtccaaaactcttgtttggggtggtttcgcgcaatttcgttatcgcacgtcatccattccgaaaacgggtgtcggggtgcatacagagcacgagtttttgccaccggaaccatttttcgtttttcgcaacgaacatgcccaatccactactttaggtccaaaactcatgtttggggtggtttcgcgcaatttcgttgtcgcacgtcacccattctgaaaacgggtgtcggggtgcatacaaagcacgagtttttgccaccggaaccatttcttcgtttttcgcaacgaacatgcccaatccactactttaggtccaaaactcatgtttggggtggtttcgcgaaatttcgtttccgcacgtcacccattccgaaaacgggtgtcgagtgcataaaagcacgaatttttgccaccggaactattttttcgtttttcgcaacgaacatgcccaatccactactttaggtccaaaactcatgtttggggtggtttcgcgcaatttcgttgtcgcacgtcacccattcccaaaacgggtgtcggggtgcatacaaagcacgagtttttgccaccggaaccatttcttcgtttttcgcaacggacatgcccaatccactactttaggtacaaaactcatgtttggggtggtttcgcacaattttggttgccgcacgtcacccattccgaaaaaagggtgtcgggtgcataaaaagcacgagtttttgccaccggaaccatttcttcgtttttcgcaacggacatgcccaatccactactttaggtacaaaactcatgtttggggtggtttcgcacaattttgttgcctcacgtcacccattctgaaaacggttgtcggggtgcatacaaagcacgagtttttgccaccggaaccatttgttcgtttttcgtaacgaacatgcccaatccactactttaggtccaaaactcatgtttggggtggtttcgcacaatttcgttgtcgcacgtcacccattccgaaaacgggtgtcgggtgcatacaaagcacgagtttttgccaccggaacgatttcttcgtttttcgcaacgaacatgcccaatccactactttaggtacaaaactcaggtttggggtggtttcgcgcaatttcgttgccgcacgtcactcattccgaaaacgagtgtcgggtgcataaaagcacgagtttttgccaccggaaccatttcttcgtttttcggaacgaacatgcccaatccactactttaggtccaaaactcatgtttggggtggtttcgcgcaatttcgttgccgcacgtcacccattccgaaaacggttgtcggggtgcatacaaagcacgagtttttgccaccggaaccatttcttcgtttttcgcaacgaacatgcccaatccactactttaggtccaaaactcatgtttggggtgatttctcgcaatttcgttgtcgcacgtcacccattccgaaaacgggtgtcgggtgcatacaaagcatgagtttttgccaccggaaccatttcttcattttttgcaacgaacatgcccaatccactactttaggtccaaaactcatgtttggggtggtttctcgcaatttcgttgtcgcacgtcacccattccaaaaacgggtgtcgggtgcatacaaagcacgagtttttgccaccgaaaccatttcttcgtttttcgcaacgaacatgcccaatccactactttaggtccaaaactcatgtttggggtggtttcgcgcaaattcgttgccgcacgtctcccattccgaaaacggttgtcgagggtgcatacaaagcacgagtttttgccaccggaaccatttcttcgtttttcgcaacgaacatgcccaatccactactttaggtacaaaactcatgtttggggtggtttcgcgcaatttcgttgtcacacgtcacccattccgaaaacgggtgtaggggtgcatacaaagcacgagtttttgccaccggaaccatttcttcgtttttcgcaacgaacatgcccaatccactactttaggtccaaaacacatgtttggggtggtttctcgcaatttcgttgtcgcacgtcacccattccgaaaacgggtgtcgggtgcataaaagcacgagtttttgccaccggaaccatttcttcgtttttcgcaacgaacatgcccaatccactactttaggtccaaaactcatgtttggggtggtttcgcgcaatttcgttttcgcacgtcacccattccgaaaacgggtgtcgggtgcatataaagcacgagtttttgcgaccggaaccatttcttcgtttttcgcaacgaacatgcccaatccactactttaggtacaaaactcatgttagggggtggtttcgcgcaatttcgttgtcacccgtcacccattccgaaaacgggtgtcgggtgcataaaagcacgagtttttgccaccggaaccatttcttcgtttttcgcaacgcacatgcccaatccactactttaggtccaaaactcatgtttggggtggtttcgcgcaatttcgtttccgcacgtcacccattccgaaaacgggtgtcgggtgcataaaagcacgagtttttgccacctgaaccatttcttcgtttttcgcaacgaacatgcccaatccactactttaggtccaaaactcatgtttggggtggtttcgcgcaatttcgatcaaggagaagataccgtcgacctccccggtttgatttggacccattcgcccgatagtgagtctatacgccgtcg

SEQ ID NO: 584 - DNA, 6837 bp, Zea mays
  VARIATION (6687)..(6687): /replace="c" or "g" or "t"
  misc_feature (6687): /note="Nucleotide given in the sequence has no preference with respect to those in the annotation for said position"
  source: /note="Zea mays BAC clone full insert sequence contig bacm.pk007.b16.fis18"
atcaagtctactttcatatggatccggaattatagtcatatctgttctgaggccgccgtaatcacccattccgaaaacgggtgtcgtggtgcatacaaagcacgagtttttgccaccggaaccatttattcgttttacgcaacgaacatgcccaatccactactttaggtacaaaactcatgtttgcggtggtttcgcgcaatttttttttctcatgtcacccattcctaaaacgggtgtcggggtgcttaaaagcacgagtttttgccaccggaaccatttctttgtttttcgcaacgaacttgcccaatcccctacttttggtccaaaactcatgtttgggggggtttcgcgcaatttcgttgtcgcacgtcacccattcagaaaacgggtgtcgggtgcatacaaagcacgggtttttgccaccggaaccattttttcgtttttcgcaacgaacatgcccaatccactactttaggtccaaaactcatgtttggggtggtttcgcgcaatttcgttgtcgcacgtcacccattccgaaaaggggtgtcgggtgcatacaaagcacggatttttgccaccggaaccatttcttcgtttttcgcaacgaacatgcccaatccactactttaggtccaaaactcatgtttggggtggtttcgcgaaatttcgtttccgcacgtcacccattccgaaaacgggtgtcgagtgcataaaagcacgaatttttgccaccggaaccatttcttcgtttttcgcaacgaacatgcccaatccactactttaggtccaaaactcatgtttggggtggtttcgcgcaatttcgttgtcgcacgtcacccattcccaaaacgggtgtcgggggtgcatacaaagcacggatttttgccaccggaaccatttcttcgtttttcgcaacgaacatgcccaatccactactttaggtccaaaactcatgtttggggtggtttcgcgcaatttcgttgtcgcacgtcacccattccgaaaacgggtgtcgggtgcatacaaagcacggatttttgccaccggaaccatttcttcgtttttcgcaacgaacatgcccaatccactactttaggtccaaaactcatgtttggggtggtttcgcgcaatatcgttgtcgcacgtcacccattccgaaaacgggtgtcggggtgcatacaaagcacgagtttttgccaccggaaccatttcttcttttttcgcaacaaaaatgcccaatccactactttaggtacaaaactcatgtttgggggggtttcgcgcaatttctttgtcacacgtcacccattccaaaaacgggtgtcgagggcataaaaacacaagtttttgccacccgaaacatttttttttttttgcaacgaaaatgcccaatccactactttaggtccaaaaatcatgtttggggtggtttcgcgcaatttcgttgtcgcacgtcacccattccgaaaacgggtgtcgtggtgcatacaaagcacgagtttttgccacgggaaccatttcttcatttttcgcaaggaacatgcccaatccattactttgggtacaaaactcatgttgggggtggtttcgcgcaatttggttgtcacacgtcaccctttctgaaaacgggtgtcgggtgcataaaagcacgagttttagccactggaaccattttttcgtttttcgcaacgcacatgcccaatccactactttaggtccaaaactcatgtttggggtggtttcgcacaatttcgttgccgcacgtcacccattctgaaaacgggtgtcgggtgcatacaaagcacgagtttttgccacctgaaccatttcttcgtttttcgcaacgaacatgcccaatccactactttaggtcctaaactcatgtttggggtggtttcgcgcaatttcgttgtcgcacgtcacccattccgaaaacgggtgtcgtggtgcatacaaaccacgagtttttgccaccggaaccatttcttcatttttcgcaacgaacatgcccaatccactactttaggtacaaaactcatgtttggggtggtttcgcgcaatttcgttgtcacacgtcacccattctgaaaacgggtgtcgggtgcataaaagcacgagttttagccaccggaaccatttcttcgtttttcgtaacgaacatgcccaatccactactttaggtccaaaactcatgtttggggtggtttcgcacaatttcgttgccgcacgtcacccattctgaaaacgggtgtcaggtgcatacaaagcacgagtttttgccaccagaaccatttcttcgtttttcgcaacgaacatgcccaatccactactttaggtccaaaactcatgtttggggtggtttcgcgcaacttcgttgccgcacgtcacccattccgaaaacgggtgtcgggtgcatacaaagcacgagtttttgccaccggaaccatttcttcgtttttcgcaacgaacatgcccaatccactactttaggtccaaaactcatgtttggggtggtttcgcgcaatttcgttgtcgcacgtcacccattccgaaaacgggtgtcggggtgcatacaaaccacgagtttttgccaccggaaccatttcttcgtttttcgcaacgaacatgcccaatccactactttaggtccaaaactcatgtttggggtggtttcgcacaatttcgttgccgcacgtcacccattctgaaaacgggtgtcgggtgcatacaaagcacgagtttttgccaccggaaccatttcttcgtttttcgcaacgaacatgcccaatccactactttaggtccaaaactcatgtttggggtggtttcgcgcaatttcgttgtcgcacgtcacccattccgaaaacgggtgtcgggtgcatacaaagcacgagtttttgccaccggaaccatttcttcgtttttcgcaacgaacatggccaatccactactttaggtccaaaactcatgtttggggtggtttcgcgcaatttcgttgtcgcacgtcacccattccgaaaacgggtgtcgtggtgcatacaaagcacgagtttttgccaccggaaccatttcttcatttttcgcaacgaacatgcccaatccactactttaggtacaaaactcatgtttggggtgttttcgcgcaatttcgttgtcacatgtcacccattccgaaaacgggtgtcgggtgcataaaagcacgagttttagccactggaaccattttttcgtttttcgcaacgaaaatgcccaatccactactttaggtccaaaactcatgtttggggtggtttcgcacaatttcgttgccgcacgtcacccattctgaaaacgggtgtcgggtgcatacaaagcacgagtttttgccacctgaaccatttcttcgtttttcgcaacgaacatgcccaatccactactttaggtcctaaactcatgtttggggtggtttcgcgcaatttcgttgtcgcacgtcacccattccgaaaacgggtgtcgggtgcataaaagcacgagtttttgccaccggaaccatttcttcgtttttcgcaacgaacatgcccaatccactactttaggtccaaaactcatgtttggggtggtttcgcgcaatttcgttgccgcacgtcacccattccgaaaacgggtgtcgggtgcataaaagcacgagtttttgccaccggaaccatttcttcgtttttcgcaacgaacatgcccaatccactacattaggtacaaaactcatgtttggggtggtttcacgcaatttcgttgtcacacgtcacccattccgaaaacgggtgtcgggtgcataaaagcacgagtttttgccaccggaaccatttcttcgtttttcgtaacgaacatgcccaatccactactttaggtccaaatctcatgtttggggtggtttcgcacaatttcgttgccgcacgtcacccattctgaaaacgggtgtcgggtgcatacaaagaaagagtttttgccaccggaaccatttcttcggttttcgcaacgaacatgcccaatccactactttaggtccaaaactcatgtttggggtggtttcgcgcaatttcgttgtcgcacgtcacccattcagaaaaggggtgtcgggtgcatacaaagcacggtttttcgccaccggaaccttttctttttttttcgcaaagaacacgcccaatccactactttaggtccaaaactcatgtttggggtggtttcgcgcaatttcgttgtcgcacgtcacctccgaaaacgggtgtcgggtgcatacaaagcacggatttttgccaccggaaccatttcttcgtttttcgcaacgaacatgcccaatccactactttaggtccaaaactcatgtttggggtggtttcgcgcaatatcgttgtcgcacgtcacccattccgaaaacgggtgtcgtggtgcatacaaagcacgagtttttgccaccggaaccatttcttcgtttttcgcaacgaacatgcccaatccactactttaggtacaaaactcatgtttggggtggtttcgcgcaatttcgttgtcgcacgtcacccattccgaaaacgggtgtcggggtgcatacaaaccacgagtttttgccaccggaaccatttcttcgtttttcgcaacgaacatgcccaatccactactttaggtccaaaactcatgtttggggtggtttcgcataatttcgttgtcgcacgtcacccattctgaaaacgggtgtcgggtgcatacaaagcacgagtttttgccaccggaaccatttcttcgtttttcgcaacgaacatgcccaatccactactttaggtccaaaactcatgtttggggtggtttcgcgcaatttcgttgtcgcacgtcacccattccgaaaacgggtgtcgggtgcatacaaagcacgagtttttgccaccggaaccatttcttcgtttttcgcaacgaacatggccaatccactactttaggtccaaaactcatgtttggggtggtttcgcgcaatttcgttgtcgcacgtcacccattccgaaaacgggtgtcgtggtgcatacaaagcacgagtttttgccaccggaaccatttcttcatttttcgcaacgaacatgcccaatccactactttaggtacaaaactcatgtttggggtggtttcgcgcaatttcgttgtcacacgtcacccattctgaaaacgggtgtcgggtgcataaaagcacgagttttagccaccggaaccatttcttcgtttttcgcaactaacatgcccaatccactactttaggtccaaaactcatgtttggagtggtttcgcacaatttcgttgtcgcacgtcacccattcctaaaacgggtgtcgtggtgcatacaagcacgagtttttgccaccggaaccatttcttcgtttttcgcaatgatatgcccaatctactactttaggtacaaaactcatgtttggggtggtttcgcgcaatttcgttgtcacatgtcacccattccgaaaacgggtgtcgggtgcataaaagcacgagtttttgccaccggaaccatttcttcgtttttcgcaacgaacatgcccaatccactactttaggtccaaaactcttgtttggggtggtttcgcgcaatttcgttatcgcacgtcatccattccgaaaacgggtgtcggggtgcatacagagcacgagtttttgccaccggaaccatttttcgtttttcgcaacgaacatgccaaattcactactttaggtacaaaactcatgtttggggtggtttcgcgcaatttcgttgccgcacgtcaccgattctgaaaacggttgtcgggtgcatacaaagcacgagtttttgccaccggaaccatttcttcgtttttcgcaacgaacatgcccaatccactactttaggtccaaaactcatgtttggggtggtttcgcgaaatttcgtttccgcacgtcacccattccgaaaacgggtgtcgagtgcataaaagcacgagtttttgccaccggaaccatttcttcgtttttcgcaacgaacatgcccaatccactactttaggtccaaaactcatgtttgtggtggtttcgcgcaatttcgttgtcgcacgtcacccattccgaaaacggttgtcgggggtgcatacaaagcacgagtttttgccaccggaaccatttcttcgtttttcgcaacgaacatgcccaatccactactttaggtccaaaactcatgtttggggtggtttcgcgcaatttcgttgccgcacgtcaccgattctgaaaacggttgtcggggtgcataaaagcacgagtttttgccaccggaaccatttcttcgtttttcgcaacgaacatgcccaatccactactttaggtccaaaactcatgtttggggtggtttcgcgcaatatcgttgtcgcacgtcacccattccgaaaacgggtgtcgggtgcatacaaagcacggatttttgccaccggaaccatttcttcgtttttcgcaacgaaaatgcccaatccactactttaggtccaaaactcatgtttggggtggtttcgcgcaatttctttgtcgcacgtcacccattccgaaaacgggtgtcgggggcaaacaaagcacggatttttgccaccggaacacttcttcttttttcgcaacaaacagaggccaacacacaatgtagggcccaaaaaacaagttaggagggggtatcccgaaattttgttgccgcaagtcaccaattccaaaaaagggtggtcgggggaaaaaaaaaacaaattttttgcaacggaaacatctgttctgtttgtccaacgagagaggcccgcacccacaccacgagggcaa

SEQ ID NO: 585 - DNA, 7017 bp, Zea mays
  VARIATION (6640)..(6640): /replace="c" or "g" or "t"
  misc_feature (6640): /note="Nucleotide given in the sequence has no preference with respect to those in the annotation for said position"
  VARIATION (6727)..(6727): /replace="c" or "g" or "t"
  misc_feature (6727): /note="Nucleotide given in the sequence has no preference with respect to those in the annotation for said position"
  VARIATION (6775)..(6776): /replace="c" or "g" or "t"
  misc_feature (6775)..(6776): /note="Nucleotides given in the sequence have no preference with respect to those in the annotations for said positions"
  VARIATION (6934)..(6934): /replace="c" or "g" or "t"
  misc_feature (6934): /note="Nucleotide given in the sequence has no preference with respect to those in the annotation for said position"
  VARIATION (6986)..(6987): /replace="c" or "g" or "t"
  misc_feature (6986)..(6987): /note="Nucleotides given in the sequence have no preference with respect to those in the annotations for said positions"
  source: /note="Zea mays BAC clone full insert sequence contig bacm.pk007.b16.fis19"
ggaaaaagaagaaagggtccgtggccaaaattgtgtttttagcccccgacacccctttcgaaatggggagtgcggaaacaaaattgtgggaaccaccccaaacatgagttttggcctaaaatagtggaattggcatgttgtttgaaaaaagaagaaatgttccggtggcaaaaacttgtgctttgtatgcaccccgacaaccgttttcagaatgggtgacgtgcggcaacgaaattgcgcgaaaccaccccaaacatgagttttgtacctaaagtagtgaattgggcatgttcgttgcgaaaaacgaagaaatggttccggtggcaaaaactcgtaatttgtatgcaccccgacacccgttttcggaatggatgacgtgcgataacgaaattgcgcgaaaccaccccaaacaagagttttggacctaaagtagtggattgggcatgttcgttgcgaaaaacgaagaaatggttccggtggcaaaaactcgtgcttttatgcacccgacacctgtttttggaatgggtgacatgtgacaacgaaattgtgcgaaaccaccccaaacatgagttttgtacctaaagtagtggattgggcatgttcgttgcgtaaaacgaagaaatggttccggtggcaaaaactcgtgctttgtatgcaccacgacacccgttttcggaatgggtgacgtgcgacaacgaaattgcgcgaaaccaccccaaacatgagtttttgacctaaagtagtggattgggcatgttcgttgcgaaaaacgaagaaatggttccggtggcaaaaactcgtgctttgtatgcacccgacacctgttttcggaatgggtgacgtgcgacaacgaaattgcgcgaaaccaccccaaacatgagttttggacctaaagtagtggattgggcatgttcgttgcgaaaaacgaagaaatcgttccagtggcaaaaactcgtgctttgtatgcacccgacacccgttttcggaatgggtgacgtgcgacaacgaaattgtgcgaaaccaccccaaacatgagttttggacctaaagtagtggattgggcatgttcgttacgaaaaacgaacaaatggttccggtggcaaaaactcgtgctttgtatgcaccccgacaaccgttttcagaatgggtgacgtgcggcaacaaaattgtgcgaaaccaccccaaacatgagttttgtacctaaagtagtggattgggcatgtccgttgcgaaaaacgaagaaatggttccggtggcaaaaactcgtgctttgtatgcaccccgacacccgttttcggaatgggtgacgtgcgacaacgaaattgcgtgaaaccaccccaaacatgagttttggacctaaagtagtggattgggcatgttcgttgcgaaaaacgaagaaatggttccggtggcaaaaattcgtgcttttatgcactcgacacccgttttcggaatgggtgacgtgcggaaacgaaattgcgcgaaaccaccccaaacatgagttttggacctaaagtagtggattgggcatgtttgttacgaaaaacgaagaaatggttccggtggcaaaaactcgtgcttttatgcacccgacacacgttttcagaatgggtgacgtgtgacaacgaaattgcgcgaaaccaccccaaacatgagttttgtacctaaagtagtggattaggcatgttcgttgcgaaaaacgaagaaatggttccggtggcaaaaactcgtgcttttatgcacccgacacccgttttcggaatgggtgacatgtgacaacgaaattgcgcgaaaccaccccaaacatgagttttgtacctaaagtagtggattgggcatgttcgttgcgaaaaacgaagaaatggttccggtggcaaaaactcgtgcttttatgcacccgacacccgttttcggaatgggtgacatgtgacaacgaaattgcacgaaaccaccttaaacatgagttttgtacctaaagtagtggattgggcatgttcgttgcgtaaaacgaagaaatggttccggtggcaaaaactcgtgctttgtatgcaccacgacacccgtttcggaatgggtgacgtgcgacaacgaaattgcgcgaaaccaccccaaacatgagtttttgacctaaagtagtggattgggcatgttcgttgcgataaacgaagaaatggttccggtggcaaaaactcgtgctttgtatgcacccgacacctgttttcggaatgggtgacgtgcgacaacgaaattgcgcgaaaccaccccaaacatgagttttggacctaaagtagtggattgggcatgttcgttgcgaaaaacgaagaaatggttccggtcgcaaaaactcgtggtttgtatgcaccacgacacccgttttcggaatgggtgacgtgcgacaacgaaattgcgctaaaccaccccaaacatgagttttggacctaaagtagtggattgggcatgttcgttgcgaaaaatgaagaaatggttccggtggcaaaaactcgtgctttgtatgcacccccgacacccgttttcggaatgggtgacgtgcggaaacgaaattgcgcgaaaccaccccaaacatgagttttggacctaaagtagtggattgggcatgttcgttgcgaaaaacgaagaaatggttccggtggcaaaaactcgtgctttatatgcacccgacacccgttttcggaatgggtgacgtgcggaaacgaaattgcgcgaaaccaccccaaacatgagttttggacctaaagtagtggattgggcatgttcgttgcgaaaaacgaagaaatggttccggtggcaaaaactcgtgctttatatgcacccgacacccgttttcggaatgggtgacgtgcgaaaacgaaattgcgcgaaaccaccccaaacatgagttttggacctaaagtagtggattgggcatgttcgttgcgaaaaacgaagaaatggttctggtggcaaaaactcgtgctttgtatgcacccgacacccgttttcagaatgggtgacgtgcggcaacgaaattgtgcgaaaccaccccaaacatgagttttggacctaaagtagtggattgggcatgttcgttacgaaaaacgaagaaatggttccagtggctaaaactcgtgcttttatgcacccgacacccgttttcagaatgggtgacgtgtgacaacgaaattgcgcgaaaccaccccaaacatgagttttgtacctaaagtagtggattgggcatgttcgttgcgaaaaatgaagaaatggttccggtggcaaaaactcgtggtttgtatgcaccacgacacccgttttcggaatgggtgacgtgcgacaacgaaattgcgcgaaaccaccccaaacatgagttttggacctaaagtagtggattgggcatgttcgttgcgaaaaacgaagaaatggttcaggtggcaaaaactcgtgcttttatgcacccgacacccgttttcggaatgggtgacgtgcggaaacgaaattgcgcgaaaccaccccaaacatgagttttggacctaaagtagtggattgggcatgtgcgttgcgaaaaacaaagaaatggttccggtggcaaaaactcgtgcttttatgcacccgacacccgttttcggaatgggtgacgtgtgacaacgaaattgcgcgaaaccaccccccaacatgagttttgtacctaaagtagtggattgggcatgttcgttgcgaaaaacgaagaaatggttccggtggcaaaaactcgtgctttgtatgcaccccgacaaccattttcggaatgggtgacgtgcggcaacgaaattgcgcgaaaccaccccaaacatgagttttggacctaaagtagtggattgggcatgttcgttacgaaaaacgaagaaatggttccggtggcaaaaactcgtgcttttatgcacccgacattcgtgtttggaatgagtagtgacgtgctgcaacgaaattgcgcgaaaccaccccaaacatgagttttgtacctaaagtagtggattgggcatgttcgttgcgaaaaacgaagaaatggttccggtggcaaaaactggtgctttgtatgcaccccgacaactattttcagaatgggtgacgtgtggcaacgaaattgcgcgaaaccaccccaaacatgagttttggacctaaagtagtggattgggcatgttcgttgcgaaaaacgaagaaatggttccggtggcaaaaactcgtgcttttatgcacccgacacccgttttcggaatgggtgacgtgcgacaacgaaattgcgcgaaaccaccccaaacatgtgtttcggacctaaagtagtggattgggcatgttcgttgcgaaaaacgaagaaatggttccggtggcaaaaactcgtgctttgtatgcacccccctacacccgttttcggaatgggtgacgtgcgacaacgaaattgcgcgaaaccaccccaaacatgagttttgtacctaaagtagtggattgggcatgttcgttgagaaaaacgaagaaatggttccggtggcaaaaactcgtgtttttatgcactcgacacccgttttcggaatgggtgacgtgtgacaacgaaattgcgcgaaaccaccccaaacatgagttttgtacctaaagtagtggattgggcatgttcgttgcgaaaaacgaagaaatggttccggtggcaaaaactcgtgcttttatgcacccgacactcgttttcggaatgagtgacgtgcggcaacgaaattgcgcgaaaccaccccaaacatgagttttggacctaaagtagtggattgggcttgttcgttgcgaaaaacgaagaaatggttccggtggcaaaaattcgtgctttgtatgcacccgacacctgttttcggaatgggtgacgtgcgacaacgaaattgcgtgaaaccaccccaaacatgagttttggacctaaagtagtggattgggcatgttcgttgcgaaaaacgaagaaatggttccggtggcaaaaactcgtgctttgtatgcacccgacacccgttttcggaatgggtgacgtgcgacaaccaaattgtgcgaaaccacccaaacatgagttttggacctaaagtagtggattgggcatattcgttacgaaaaacgaagaaatggttccggtggcaaaaactcgtgctttgtatgcaccccgacaaccgttttcagaatgggtgacgtgcggcaacaaaattgtgcgaaaccaccccaaacatgagttttgtacctaaagtagtggattgggcatgtccgttgcgaaaaacgaagaaatggttccggtggcaaaaactcgtgctttgtatgcaccccgacacccgttttgggaatgggtgacgtgcgacaacgaaattgcgcgaaaccaccccaaacatgagttttggacctaaagtagtggattgggcatgttcgttgcgaaaaacgaagaaatggttccggtggcaaaaattcgtgcttttatgcactcgacacccgttttcggaatgggtgacgtgcggaaacgaaatttcgcgaaaccaccccaaacatgagttttggacctaaagtagtggattgggcatgttcgttgcgaaaaacgaagaaatggttccggtggcaaaaatccgtgctttgtatgcacccgacacccgttttcggaatgggtgacgtgcgacaacgaaattgcgcgaaaccaccccaaacatgagttttggacctaaagtagtggattgggcatgttcgttgcgaaaaacgaagaaatggttccggtggcaaaaatccgtgctttgtatgcacccgacacccgttttcggaatgggtgacgtgcgacaacgatattgcgcgaaaccaccccaaacatgagttttggacctaaagtagtggattgggcatgttcgttgcgaaaaacgaagaaatggttccggtggcaaaaactcgtgcttttatgcaccccgacaaccgttttcagaatcggtgacgtgcggcaacgaaattgcgcgaaaccaccccaaacatgagttttgtacctaaagtagtggattgggcatgttcgttgcgaaaaacgaagaaatggttccggtggcaaaaactcgtgctttgtatgcacccccgacaaccgttttcggaatgggtgacgtgcgacaacgaaattgcgcgaaaccaccacaaacatgagttttggacctaaagtagtggattgggcatgttcgttgcgaaaaacgaagaaatggttccggtcgcaaaaactcgtggtttgtatgcaccacgacacccgttttcggaatgggtgacgtgcgacaacgaaattgcgctaaaccaccccaaacatgagttttggacctaaagtagtggattgggcatgttcgttgcaaaaaacgaagaaatggttcaggtggcaaaaactcgtgcttttatgcacccgacacccgttttcggaatgggtgacgtgcggaaacgaaattgcgcgaaaccaccccaaacatgagttttggacctaaagtagtggattgggcatgttcgttgcgtaaaacgaagaaatggttccggtggcaaaaactcgtgctttgtatgcaccacgacacccgttttcggaatgggtgacgtgcgacaacgaaattgcgcgaaaccacccgggacatgagttttgtacctaaagtaatgaattgggcatgttcgttgcgaaaaacaaaaaaatggttccggtggcaaaaactcgtgctttgtatgcaccccacaccccttttcagaatgggtgacgtgcgaaaacgaatttgcgcgaaaccccccccaacaaaaattttggacccaaagtactggattggggcagttcctcgcaaaaaacaaaaaaatggctcccggtgggaaaaacccttgcttttgtaggcccccgaaacccccttttcagaaggggggaggcgcgagaaccgatattctggggaaacccctccaaccaatagttttggaccataatgaatcccattgggggagctttccgtgcacaccaaaaaaaaatgggtcccgcgggagaaaggcgct

SEQ ID NO: 586 - DNA, 3641 bp, Zea mays
  source: /note="Zea mays BAC clone full insert sequence contig bacm.pk007.b16.fis20"
cgaggccaaaagaagtgggcagccaacacctcatgtgtcttgtagacgccaaagtgccccatgagaccgcctccatgtgcttcctgtaacaacaaaagacgaaccgagctagctggaacacacagcttgttagcgcgaaacaggaacccatcctgtatgtgaaatttgccccatggtttcccattaaaacaatggccgaaagcatctttaaaatcagcatcgtcaacatattgatcttttacagtgtgcaaaccaaagattttaaaatctaactgtgacagcatggtatagcgacgagacaaagcatcagcaataacattgtccttcccgttcttgtgtttaataatgtaaggaaaagactcaatgaattctacccatttagcatgacgacggttcagatttgtttgggtacgaatatgttttaaagcctcatgatcagaatgaattatgaactcacgatgccaaagatagtgctgccatgtatgtaaagtgcgcactaacgcgtaaagctccttatcataagtagaatatttgagactagcaccgcttaatttttcactaaaataagcaactagttttccttcttgtaataaaacagcacctagcccaataccgctagcatcgcattcaagctcaaatactttattaaaatcaggcaattgcaataggggagcttgggttaacttatctttcaaagtgctgaacgcttcctcctgcgaatcactccaagcaaacggcacatctttctttgtaagctcatgtagaggcgctgcaatggagctaaaatcacgaacaaatctgcggtagaaaccgacaagtccaagaaagctccgaatttgtgtgaccgtcgtcggtgtaggccactcccgaatggcagcaatcttgctgctatccacctcaatgccctgtggagtaacaacataaccaagaaacgagacacgtcgtgtgcaaaagatgcatttttccatgttagcgaataactgggcggcacgcaatgcatcaaaaacagcacttaaatgttccaaatgctctttcttagatttgctgtaaataaggatatcatcgaaataaacaaccacaaacaatcctatgaagggcctcagaacttcattcatcactcgcataaaagtgctgggagcattagtcaatccaaacggcataaccaaccattcatataaaccaaatttcgttttgaaggttgttttccattcatcacccagtttcattctaatctggtggtaaccactacgcaaatcaatcttagtgaaaataatggcaccactaagctcatctagcatatcatcaaggcgtggtataggatagcgataacgaatagtgatgttattaatagcacgacagtctacacacatacgccatgacccatccttcttgggaacaagtaacacaggaacagagcaagggctaagagactcacgaatgtatcctttgtcaagcaacgcctgtacctggcgctgaatctccttcgtctcatccggatttgtacggtatggtgcgcggttcggaagctgtgcaccgggaatgaggtcgatctggtgctcaatgccacgaagcggtgggagacccggtggtaagtctttgggaaagacatcagcgtactcctgcaaaaggttagcaaccatagggggaatagccaaagatggtgcatcatcaagtgaaatgaggacactagagcatacaagtgcatagcatggcaaatgagcaccgtgtagatcatcaaaatcagcacgtgtagcaagtaaaacaggagccttcaacttaatttcagaaggaacagagggcgatggatcaagttgtttagcagttatagcagctcgggcaagatcatctttaacaatttgttcaggtgtcattggatgtataattattttctgacccttaaaaatgaaagaataatgatttgaacgaccatgatgcaagctatcagtatcatattgccaaggtcgaccaagtaacaaagagcatgcttccatgggaataacatcacaatcaacaaaatcagaataagcacccatggagaaaggaactcgcacggaacgcgtgatttttattttaccaccatcattaagccattgaatgtgatatgggtttggatgcttacgagtgggtaacgacaacttttcgaccagcatggtactcgccaaattgttgcaactgccgctgtcgataatgatgcgaattgaccgctcctgcacaacaccctttgtatggaacagggtgtgtcgctgattcttctcgggcaaagggacctgtgtactgagaacacgctgcacaacaagactttcatacctatcagcgtcgcccgggttgacatgtacctccgccttagctgcatggtcagtggcaagtagtgcatgttcaatttcttcagaatcactagcggaagagtactcaccatcgtcacgaatgagtaaagtgcgcttgtttgggcagtcccgaatcacatggccaaatcctctacagcgatgacactgaatatcccgtgtacgacctgtgggtggggcagtgctggctggtttggtcgtcttctcgcgtggagtagtggtggacgtggatggcgcagggggaactggtgctgaggtggatgtcgagcttcgtcctgcaaaagggttagaatattgcttcgagcggcgtccctgcacttcacgttcagctttgcaagcatattcaaataaagtagtcatatcataatattccttataatcaagtatatcttggatttcgcggtttaaaccaccacgaaaacgtgccatagcagcgtcgttgtcctccaatatcccacaacgaatcatacctttttgtaactcctggaaatagtcctcaacagattgagaaccttgctgaaaacgctgcattttattaagcaaatcacgagcataatacgaaggcacaaatcgatgtcgcatcgcagctttcaactgatcccaagtggttggaatggtagtgggatgttttattttaaactcacgccaccaaattaaagcaaaatcagtaaattcactaatagcagctttaccctgagaatgtgcagcaatatcatggcatgaaaatttttgttcaacctctaactcccaatcaagatatgcagcaggatcatatttgccattaaaaggtggaattttaaatttaatcttagaaaataagtcattagggggatgacgaaccacacggcgtgcacgaccacggcgatctccatcgtcccactcagtgtcaccgccgtagtcctgctccatctttgtggtcaacgcatcaaggcgtgccaggatggagtcgagtgtggtgcgagtcgccgtttgagcaaggtcaagctggttgaaacgctcggtcgtcgaagtgaccgttgaatcaagccgttcatgcatcgtcctaatgtcatcagcaagtccatcaacttgtccctttacttccagcaactgggcatccaccgtgtcatgtgctcctgccatagttagcgcaaacaccaaaacaccaaaaaacgacaaaaacaggggtgtactgctcacaaggcgctcacactagtgctgttatcaaattcttatccgttcttatcaaggtaaaagataccgtcgacctccacgcgttttatatgaacccattcgccctataggagtctatacgcggtc

SEQ ID NO: 587 - DNA, 6711 bp, Zea mays
  source: /note="Zea mays BAC clone full insert sequence contig bacm.pk007.b16.fis21"
tcgaccgcgtatcgactcctacagggcgaattgggtcaaatacacacccgtcgaggtcgacggtatttttcccttgatgtttttggaataccatgtaaacgaataatttctctaaagaacaattcagcaacaatgctagcatcatcagttttatgacaaggtataaagtgagccatttttgagaatctatcaacaaccacaaaaatactatccctccccttcttagttctaggcaagcccaaaacaaagtccatagagatatcaagccaaggagaagaagggacaggcaaaggcatatacaaaccatggttgttcaaccgtgacttagctttctgacaagtagtgcagcgtgcaacaaggcgctccacatcagcgcgcatccgaggccaaaagaaatgggcagccaacacctcatgcgttttgtagacgccaaaatgccccatgagaccgcctccatgcgcttcctgtaacaacaaaagacgaaccgagctagctggaacacacagcttgttagcgcgaaacaggaacccatcctgtatgtgaaatttgccccatggtatcccattaatacaatggccgaaagcatctttaaaatcagcatcgtcaacatattgatccttcacagtgtccaaaccaaagattttaaaatctaattgtgacagcatggtatagcgacgagacaaagcatcagcaataacattgtccttcccgttcttgtgtttaataatgtaaggaaaggactcaatgaattcgacccatttagcatgacgacggttcagatttgtttgggtacgaatatgttttaaagcctcatgatcagaatgaattatgaactcacgatgccaaagatagtgctgccaagtatgcaaagtgcgcactaaagcgtaaagttccttatcataagtagaatattttagactagcaccgcttaatttttcactaaaataagcaactggttttccttcttgtaacaaaacagcacctagcccaataccgctagcatcgcattcaagctcaaaaactttattaaaatcaggcaattgcaagaggggagcttgggttaacttatctttcaaagtgctgaacgctacctcctgcgaatcacttcaagcaaacggcacatctttctttgtaagctcatgtagaggcgctgcaatggagctaaaatcacgaataaatctgcggtagaaaccggcaagtccaagaaagctccgaatttgtgtgaccgtcgtcggtgtaggccactcccgaatggcagcaatcttgctgctatccacctcaatgccctgcggagtaaccacataaccaagaaacgagacacgttgcgtgcaaaatgtccacttttccatgttaccaaacaagcgagcagcacgcaaagcgtcaaaaacagcacgcaaatattctaaatgctcctctatagacttgctgtaaataaggatatcatcgaaataaacaacaacaaacaaacctatgaaggcccgtagaacttcgttcattaaacgcattaaggtgctgggagcattagtcaatccaaatggcataaccaaccattcatataaaccaaatttcgttttaaaagccgttttccattcatcaccgagtttcattctaatctgatggtaaccgctacgcaaatcaaccttagagaaaataacggcaccactaagctcatctagcatatcatcaaggcgtggaataggatatcgataacgaactgtgatgttattaatagcacgacaatctacgcacatacgccatgacccatctttctttggaacgagtaaaacaggaaccgagcaagggctaagagactcacaaatgtaacccttatcaagcagcgtctgcacctggcgctggatctccttcgtctcatctggatttgtacggtacggggcgcggttcggaagagaagcgccggggatgagatcgatctgatgctcaatgccacggaggggaggaagacccggtggtaagtccataggataaacatcagcatactcctgcaaaaggttaacaacagcagggggtatatccaaagatggtgcatcatcaagcggaacaagcattcgcgagcatacaagtgcataacagggcatatgagcttcatggagatcatcaaaatcagcacgtgtagcaagtaaaacaggagagtgcaacttgatttcagatttaataggtgcggctgatgtcgatttgacttgttgtgcagttttagcagccctagtaagatcatctttcaaaatttggtcagggtcattggatgtataattattttctggcctttaaacatgaaagaataatgatttgaacgaccatgatgtaaactatcagtatcatattgccaaggtcgacctaataacaaagagcatgcttccataggaataacatcgcaaacagcataatcagaataagaacccagcgaaaaggggacacgtaccgaacgtgttacctttattttaccaccatcattaagccattgaatgtgatacggatgtggatgtgtgcgagtgggcaaggataatttctctaccaacgctgtacttgccaaattgttgcagctgccactatcgatgatgatgcgaatcgaccgttcgtgcacgacgcccttggtatggaatagagtgtgtcgctgatttttttcggcctgggcaacctgtgtgctgagaacacgctgcacaacaagactctcatacccatcggcgtcgatgggatcaacgtggacttcctcattttctacatggttagtggcaatcatagcatgactagtttcctcagaatcactggctgaagagtactcaccattgtcacgtataagcaaggtacgcttgtttgggcagtcccgaatcatgtgcccaaaccctctgcaacgatggcacttaatatcccgtgtacgtcctgtggaagaagcggcgcctttggcagggggcgccactggcttggtcgtccctgtgcgcgaagtagtgctaggcgtagaaggtgcagggctggaaggagttgagctgtgtgttggaccccggcctgcaaaagagttagtatatgtctttgatcgtcgtccctgcacttcacgttcagctttgcaagcatattcaaacaatgtggttatatcaaaataatccttataatcaagtatatcctgaatttccctgttcaaaccaccacgaaaacgcgccatagcagcgtcatccgactcaaccaaaccacaacgaagcatacccttttgtaactcctggtaatattcctcaacagactgtgaaccttgttgaaaacgctgcattttgttaagcaaatcacgagcataattggaaggaacaaatctgtggcgcatggcagcttttaattgggtccaagtaatgacactgttaatgggaagtttttgtttatactcacgccaccaaattaaagcaaaatcagtaaattcactaatggcagccttcacttggctattagcagcaatatcatggcatgaaaatttctgttctacctctaattcccaatcaagatatgcagcaggatcatatttaccattaaaagatggaattttaaatttaatcttagaaaataagtcattagggggatgacgaaccacacgacgtgcacgaccacggcgatctccatcgtcctgctcagtgtcaccgccgtattcctgctccatctttgtggtcaatgcatcaaggcgtgccaggatggtgtcgagtgtggggcgagtcgccgtttgagcaaggtcaagttggttgaaacgctcggtcgtcgaagtgatcgttgaatcaagccgttcatgcatcgtcctaatgtcagcagcaagtccatcaacttgtccccttacttcctgcaactgggcatccaccatgtcgtgtgctcctgccatagttagcgcaaacaccaaaaggagaaaaaccaacgacaaaaacaggggtgtactgctcacaaggcgctcacactagtgctgttatcaagttcttatccgttcttaccaagccacagtggtgaactgcaatcaacaggtggaaccggtgaaagattggatgagcgattgcgtggagaaacagaaacctgctcgtcgtagaaatatgtggagttgtgggtaggctgcactcaagtcaaggattagcacgatcaaacaataatgcaaaattgaattatagtgcaaaacatgaaactatattgctggccacaggtgcaaaggatggatggaactagcagaatggcagtaccgtaaatattgtactagtgatgctaaaaaggcactagtagaaatcacaggtgattttgtttttctttttttgtatgattttttcgatatttttctcagcacaggaagcaacaagataggagctacacgaagtttcacctaaaacagatatcagatgtggtctatagaaaatcaggaagttctctgaaaagcgtgcgagaactttgacgaatttttttctttattttcctgaatttttttgacaattttgtcgaaccccaaacagaccgtaggtgagtttggccggcctcagaatggtgtcaactagctcctgtaaaaatttcagattttttggacacccgagcgaaaagttatgcccggtttacggaaggttcctcaagttatgttttaaaaaacgaccgggatgaaacaaacgtatcctttctccttcgttttctttttttttgtttctgtttttttttgtaaccgaaggagaaaaacaaggaagcgttcgttgactcggtttgtttttttttctgtttttttttcgtaaccgaaggagaaaatcaaggaaacggccgttgactcggtttgttttttctgtttttttttgacgtaaccgaaggagaaaaacaaggaaacaatgttgactcggtttgtggcgtgatcaaacgggagatggtggcggcgctagggtttgaatggtggaagaacacaatgcaaccagcaacaaatgacgcgaaagcacacaaattcaacaatgcagattattgaaagaaagtgcgaggctcaaaagggtgctgggataagatctaacctaaatttttatgcggttttgtggactgtaggaaaaaaaacgctcgataaactcaccgatcaacctggaaatctgataccaattgatgaagctgaggtgcccgatctttcggcgagtagagataattccgatttgtcggaagatgacccttgcgatccgactacgacgagcaagcccgaggcgccaatgcaatcgctgaaccaactccctgtggttaccgaccttgctgatgcgagatcggcctgatcacgaagatcgtttcctgtgcgcaatcgaagaacgaacaagaacaagatgcgagcaatctaatctattactcgagggtggagttctgaatacacgaagacagcgcagatttgcgcgtgttcgagagtagctgatgtagctgaggtgcccgatctttcggcgagtagagataattccgatttggcggaagttgacccttgcgatccgactacgacgagcaagcccgaggcgccaatgcaatcgctgaaccaactccctgtggttaccgaccttgctgatgcgagatcggcctgatcacgaagatcgtttcctgtgcgcaatcgaagaacgaacaagaaaaagatgcgagcaatctaatctattactcgagggtggagttctgaatacacgaagacagcgcagatttgcgcgtgttcgagagtagctaaagctaatgtaaaacaaaactcggaaaataaaggaggcgcagctcctgtataaatagagagggggcgcagccctaggggcggccaaccctaggtcgtccataatgggccgcaattgggctggtgatggtagctgaggtgcccgatctttcggcgagtagagataattccgatttggcggaagttgacccttgcgatccgactacgacgagcaagcccgaggcgccaatgcaatcgctgaaccaactccctgtggttaccgaccttgctgatgcgagatcggcctgatcacgaagatcgtttcctgtgcgcaatcgaagaacgaacaagaaaaagatgcgagcaatctaatctattactcgagggtggagttctgaatacacgaagacagcgcagatttgcgcgtgttcgagagtagctaaagctaatgtaaaacaaaactcggaaaataaaggaggcgcagctcctgtataaatagagagggggcgcagcccctaggggcggccaaccctaggtcgtccattatgggccgcaattgggctggtcgtctattcttccgggccttcgttctttaacaacatgatgtagttcaattctcttgcacgggcccgagtcactggcccaggtggaaggggtggcgcctggactggggaagatggtgcctgggctggagaagctgctgctggtgtagatgtgctcgtgttggtgttgatgtcctcatcacaccccaaacatgagttttgtacctaaagtagtggattgggcatgttcgttgtgaaaaacgaagaaatggttccggtggcaaaaactcgtgcttttatgcacccgacacccgttttcggaatgggtgacgtgcgacaacgaaattgcgagaaaccaccccaaacatgagttttggacctaaagtagtggattgggcatgttcgttgcgaaaaacgaagaaatggttctgctggcaaaaactcgtgctttgtatgcacccgacacccgttatcaagggagaagataccgtcgacctcgagcgttttgatttg

SEQ ID NO: 588 - DNA, 8199 bp, Zea mays
  source: /note="Zea mays BAC clone full insert sequence contig bacm.pk007.b16.fis22"
gggatataaaaacaatgtttttccccccgagaaccttttttttttttttcgccaagaaacccccccatttcatgttttgaggtccaaaatttttttggggtgtggttcggcacattttgtttgtcgcacctccccctttaagaaagcggggtgtggggtgcatacaaagcacgtatttccgccaccggacccatttttttttttttcgcaaaaaacccgcccaattcattatttgaggtccaaaactcttgtggggggtggtttcgagcaattttgttgtcgcacgtcacctccgaaaacgggtgtcgggtgcatacaaagcacggatttttgccaccggaaccatttctttgttttttgcaaggaacatgcccaatccactactttaggtccaaaactcatgtttggggtggtttcgcgcaatatcgttgtcgcacgtcacccattccgaaaacgggtgtcgtggtgcatacaaagcacgagtttttgccaccggaaccatttcttcgtttttcgcaacgaacatgcccaatccactactttaggttcaaaactcatgtttggggtggtttcgcgcaatttcgttgtcgcacgtcacccattccgaaaacgggtgtcggggtgcatacaaaccacgagtttttgcccccggaaccatttcttcgtttttcgcaacgaacatgcccaatccactactttaggtccaaaactcatgtttggggtggtttcgcataatttcgttgtcacacgtcacccattccgaaaacgggtgtcgggtgcatacaaagcacgagtttttgccaccggaaccatttcttcgtttttcgcaacgaacatgcccaatccactactttaggtacaaaactcatgtttggggtggtttcgcgcaatttcgttgtcgcacgtcacccattccgaaaacgggtgtcgtggtgcatacaaagcacaagtttttgccaccggaaccatttcttcgttttacgcaacgaacatgcccaatccactactttaggtccaaaactcatgtttggggtggtttcgcgcaatttcgtttccgcacgtcacccattccgaaaacgggtgtcgggtgcataaaagcacgagtttttgccacctgaaccatttcttcgtttttcgcaacgaacatgcccaatccactactttaggtccaaaactcatgtttggggtggtttcgcgcaatttcgttgtcgcacgtcacccattccgaaaacgggtgtcgtggtgcatacaaagcacgagtttttgccaccggaaccatttcttcgttttacgcaacgaacatgcccagtccactactttaggtacaaaactcatatttggggtggtttcgcgcaatttcgttgtcacatgtcacccattccgaaaacgggtgtcggggtgcataaaagcacgagtttttgccaccggaaccatttctttgtttttcgcaacgaacatgcccaatccactactttaggtccaaaactcatgtttggggtggtttcgcgcaattttgttgtcgcacgtcacccattccgaaaacgggtgtcggggtgcatacaaaccacgagtttttgccaccggaaccatttcttcatttttcgcaacgaacatgcccaatccactactttaggtacaaaactcatgtttggggtggtttcgctcaatttcgttgtcacacgtcacccattctgaaaacgggtgtcgggtgcataaaagcacgagttttagccaccggaaccatttcttcgtttttcgtaacgaacatgcccaatccactactttaggtccaaaactcatgtttggggtggtttcgcacaatttcgttgccgcacgtcacccattctgaaaacgggtgtcgggtgcatacaaagcacgagtttttgccaccagaaccatttcttcgtttttcgcaacgaacatgcccaatccactactttaggtccaaaactcatgtttggggtggtttcgcgcaatttcgttttcgcacgtcacccattccgaaaacgggtgtcgggtgcatacaaagcacgagtttttgccaccggaaccatttcttcgtttttcgcaacgaacatgcccaatccactactttaggtccaaaactcatgtttggggtggtttcccgcaatttcgtttccgcacgtcacccattctgaaaacgggtgtcgggggtgcatacaaagcaggggtttttgccaccggaaccattttttcgtttttcgcaacgaacatgcccaatccactactttaggtccaaaactcatgtttggggtggtttcgcgcaatttcgttgtcgcacgtcacccattccgaaaacgggtgtcgggtgcatacaaagcacgagtttttgccaccggaaccatttcttcgtttttcgcaacgaacatggccaatccactactttaggtccaaaactcatgtttggggtggtttcgcgcaatttcgttgtcgcacgtcacccattccgaaaacgggtgtcgtggtgcatacaaagcacgagtttttgccaccggaaccatttcttcatttttcgcaacgaacatgcccaatccactactttaggtacaaaactcatgtttggggtggtttcgcgcaatttcgttgtcacacgtcacccattctgaaaacgggtgtcgggtgcataaaagcacgagttttagccaccggaaccatttcttcgtttttcgtaactaacatgcccaatccactactttaggtccaaaactcatgtttggagtggtttcgcacaatttcgttgtcgcacgtcacccattcctaaaacgggtgtcgggtgcatacaaagcacgagtttttgccaccggaaccatttcttcgtttttcgcaatgaatatgcccaatctactactttaggtccaaaactcatgtttggggtggtttcgcgcaatttcgttgtcgcacgtcacccattccgaaaacgggtgtcggggtgcatacaaagcacgagtttttgccaccggaaccatttcttcgtttttcgcaacgaacatgcccaatccactactttaggtacaaaactcatgtttggggtggtttcgcgcaattttgttgccgcacgtcactcattccgaaaacgattgtcgggtgcataaaagcacgagtttttgccaccggaaccatttcttcgttttttcgtaacgaacatgcccaatccactactttaggtccaaaactcatgtttggggtggtttcgcacaatttcgttgtcacacgtcacccattccaaaaacgggtgtcgggtgcatacaaagcacgagtttttgccaccagaaccatttctttgtttttcgcaacgaacatgcccaatccactactttaggtccaaaactcatgtttggggtggtttctcgcaatttcgttgtcgcacgtcacccattccgaaaacgggtgtcgggtgcatacaaagcacgagtttttgccactggaaccatttcttcgtttttcgcaacgaacatgcccaatccactactttaggtccaaaactcatgtttggggtggtttcgtgcaatttcattgtcgcacgtcacccattccgaaaacgggtgtcgggtgcatacaaagcacgagtttttgccaccggaaccatttcttcgtttttcgcaacgaacatgcccaatccactactttaggtccaaaactcatgtttggggtggtttcgcgcaatttcgttgtcgcacgtcacccattccgaaaacaggtgtcgggtgcatacaaagcacgagtttttgccaccggaaccatttcttcgtttttcgcaacgaacatgcccaatccactactttaggtccaaaactcatgtttggggtggtttcgcgcaaatttgttgccgcacgtctcccattctgaaaacgggtgtcgggggtgcataaaagagaggattttttgccaccggaaccatttcttcgtttttcgcaacgaacatgcccaatccactactttaggtacaaaactcatgtttggggtggtttcgcgcaatttcgttgtcacacgtcacccattctgaaaacgggtgtaggggtgcatacaaagcacgagtttttgccaccggaaccatttcttcgtttttcgcaacgaacatgcccaatccactactttaggtccaaaacacatgtttggggtggtttctcgcaatttcgttgtcgcacgtcacccattccgaaaacgggtgtcgggtgcataaaagcacgagtttttgccaccggaaccatttcttcgtttttcgcaacgaacatgcccaatccactactttaggtccaaaactcatgtttggggtggtttcgcgcaatttcgtagccgcacttcacccattctgaaaatagttttcggggtgcatacaaagcaccagtttttgccaccggaaccatttcttcgtttttcgcaacgaacatgcccaatccactactttaggtacaaaactcatgtttggggtggtttcgcgcaatttcgttgccgcacgtcactcattccaaacacgaatgtcgggtgcataaaagcacgagtttttgccaccggaaccatttcttcgtttttcgtaacgaacatgcccaatccactactttaggtccaaaactcatgtttggggtggtttcgcgcaatttcgttgccgcacgtcacccattccgaaaatggttgtcggggtgcatacaaagcacgagtttttgccaccggaaccatttcttcgtttttcgcaacgaacatgcccaatccactactttaggtccaaaactcatgtttggggtgatttcttgcaatttcgttgtcgcacgtcacccattccgaaaacgtgtgtcgggtgcatacaaagcacgagtttttgccaccgaaaccatttctttgtttttcgcaaagaacatgcccaatccactactttaggtccaaaactcatgtttgggggggtttcgcgcaatttcgttgtcgcacgtcacccatttcgaaaacgggtgtcgtggtgcatacaaagcacgagtttttgccaccggaaccatttcttcgttttacgcaacgaacatgcccaatccactacattaggtacaaaactcatgtttggggtggtttcacgcaatttcgttgtcacacgtcacccattccgaaaacgggtgtcgggtgcataaaagcacgagtttttgccaccggaaccatttcttcgtttttcgtaacgaacatgcccaatccactactttaggtccaaatctcatgtttggggtggtttcgcacaatttcgttgccgcacgtcacccattctgaaaacgggtgtcgggtgcatacaaagcatgagtttttgccaccggaaccatttcttcggttttcgcaacgaacatgcccaatccactactttaggtccaaaactcatgtttggatggtttcgcacaatttcgttgtcgcacgtcacccattccgaaaacgggtgtcgggtgcatacaaagcacgagtttttgccaccggaaccatttcttcgtttttcgcaacgaacatgcccaatccactactttaggtccaaaactcatgtttggggtggtttcgcgcaatttcgttgtcgcacgtcacccattccgaaaacaggtgtcgggtgcatacaaagcacgagtttttgccaccggaaccatttcttcgtttttcgcaacgaacatgcccaatccactactttaggtccaatactcatgtctggggtggtttcgcgcaatttcgttgtcgcgcgtcacccattccgaaaacgggtgtcgtggtgcatacaaagcacgagtttttgccaccggaaccatttattcgttttacgcaacgaacatgcccaatccactactttaggtacaaaactcatgtttgcggtggtttcgcgcaatttcgttgtcacatgtcacccattccgaaaacgggtgtcgggtgcataaaagcacgagtttttgccaccggaaccatttcttcgtttttcgcaacgaacatgcccaatccactactttaggtacaaaactcatgtttggggtggtttcgcgcaatttcgttgtcacatgtcacccattccgaaaacgggtgtcgggtgcataaaagcacgagtttttgccaccggaaccatttcttcgtttttcgcaacgaacatgcccaatccactactttaggtacaaaactcatgtttggggtggtttcgcgcaatttcgttgtcacacgtcacccattctgaaaacgggtgtcgggtgcataaaagcacgagtttttgccaccggaaccatttcttcgtttttcgtaacaaacatgtccaatccactactttaggtccaaaactcatgtttggggtggtttcgcgcaatttcgtttccgcacgtcacccattccgaaaacgggtgtcgagtgcataaaagcacgaatttttgccaccggaaccatttcttcgtttttcgcaacgaacatgcccaatccactactttaggtccaaaactcatgtttggggtggtttcgcgcaatttcgttgtcgcacgtcacccattccgaaaacgggtgtcggggtgcatacaaagcacgagtttttgccaccggaaccatttcttcgtttttcgcaacggacatgcccaatccactactttaggtacaaaactcatgtttggggtggtttcgcacaattttgttgcctcacgtcacccattctgaaaacggttgtcggggtgcatacaaagcacgagtttttgccaccggaaccatttgttcgtttttcgtaacgaacatgcccaatccactactttaggtccaaaactcatgtttggggtggtttcgcacaatttcgttgtcgcacgtaacccattccgaaaacgggtgtcgggtgcatacaaagcacgagtttttgccaccggaacgatttcttcgtttttcgcaacgaacatgcccaatccactactttaggtccaaaactcatgtttggggtggtttcgcgcaatttcgttgtcgcacgtcacccattccgaaaacaggtgtcgggtgcatacaaagcacgagtttttgccaccggaaccatttcttcgtttatcgcaacgaacatgcccaatccactactttaggtcaaaaactcatgtttggggtggtttcgcgcaatttcgttgtcgcacgtcacccattccgaaacgggtgtcggggtgcatacaaagcacgagtttttgccaccggaaccatttcttcgttttacgcaacgaacatgcccaatccactactttaggtacaaaactcatgtttgggggggtttcgcgcaatttcgttgtcacatgtcacccattccgaaaacgggtgtcgggtgcataaaagcacgagtttttgccaccggaaccatttcttcgtttttcgcaacgaacatgcctaatccactactttaggtacaaaactcatgtttggggtggtttcgcgcaatttcgttgtcacacgtcacccattctgaaaacgtgtgtcgtgtgcataaaagcacgagtttttgccaccggaaccatttcttcgtttttcgtaacaaacatgcccaatccactactttaggtccaaaactcatgtttggggtggtttcgcgcaatttcgtttccgcacgtcacccattccgaaaacgggtgtcgagtgcataaaagcacgaatttttgccaccggaaccatttcttcgtttttcgcaacgaacatgcccaatccactactttaggtccaaaactcatgtttggggtggtttcgcgcaatttcgttgtcgcacgtcacccattccgaaaacgggtgtcggggtgcatacaaagcacgagtttttgccaccggaaccatttcttcgtttttcgcaacgaacatgcccaatccactactttaggtccaaaactcatgtttggggtggtttcgcgaaatttcgttgtcgcacgtcacccattccgaaaacgggtgtcgtggtgcatacaaagcacgagtttttgccaccggaacaatttcttcgtttttctcaacgaacatgcccaatccactactttaggtacaaaactcatgtttggggtggtttcgcgcaatttcgttgtcacacgtcaccattccgaaaacgggtgtcgagtgcataaaagcacgagtttttgccaccggaaccatttcttcgtttttcgcaacgaacatgcccaatccactactttaggtccaaaactcatgtttggggtggtttcacgcaatttcgttgtcgcacgtcaccca

SEQ ID NO: 589 - DNA, 8505 bp, Zea mays
  source: /note="Zea mays BAC clone full insert sequence contig bacm.pk007.b16.fis23"
gaggtatcttatcaataagaagggatgagttttgtacctaaagtagtggattgggcatgtccgttgcgaaacacgaagaaatggttccggtggcaaaaactcgtgctttgtatgcaccccgacacccgttttcggaatgggtgacgtgcgacaacgaaattgcgcgaaaccaccccaaacatgagttttggacctaaagtagtggattgggcatgttcgttgcgaaaaacgaagaaatggttccggtggcaaaaactcgtgcttttatgcactcgacacccgttttcggaatgggtgacgtgcggaaacgaaattgcgcgaaaccaccccaaacatgagttttggacctaaaatagtggaattggcatgttcgttgtgaaaaacgaagaaatggttccggtggcaaaaacttgtgctttgtatgcaccccgacaaccgttttcagaatcggtgacgtgcggcaacgaaattgcgcgaaaccaccccaaacatgagttttgtacctaaagtagtgaattgggcatgttcgttgcgaaaaacgaagaaatggttccggtggcaaaaactcgtaatttgtatgcaccccgacacccgttttcggaatggatgacgtgcgataacgaaattgcgcgaaaccaccccaaacaagagttttggacctaaagtagtggattgggcatgttcgttgcgaaaaacgaagaaatggttccggtggcaaaaactcgtgcttttatgcacccgacacctgttttcggaatgggtgagctgtgacaacgaaattgcgcgaaaccaccccaaacatgagttttgtacctaaagtagtggattgggcatgttcgttgcgtaaaacgaagaaatggttccggtggcaaaaactcgtgctttgtatgcaccacgacacccgttttcggaatgggtgacgtgcgacaacgaaattgcgcgaaaccaccccaaacatgagttttgtacctaaagtagtggattgggcatgttcgttgcgaaaaacgaagaaatggttccggtggcaaaaactcgtgctttgtatgcacccgacacccgttttcggaatgggtgacgtgcgacaacgaaattgcgcgaaaccaccccaaacatgagttttggacctaaagtagtggattgggcatgttcgttgcgaaaaacgaagaaatggttccggtggcaaaaactcgtgctttgtatgcacccgacacccgttttcagaatgggtgacgtgcgacaacgaaattatgcgaaaccaccccaaacatgagttttggacctaaagtagtggattgggcatgttcgttgcgaaaaacgaagaaatggttccggtggcaaaaactcgtggtttgtatgcaccccgacacccgttttcggaatgggtgacgtgcgacaacgaaattgcgcgaaaccaccccaaacatgagttttggacctaaagtagtggattgggcatgttcgttgcgaaaaacgaagaaatggttccggtggcaaaaactcgtgcttttatgcacccgacacccgttttcggaatgggtgacatgtgacaacgaaattgcgcgaaaccaccccaaatatgagttttgtacctaaagtagtggattgggcatgttcgttgcgtaaaacgaagaaatggttccggtggcaaaaactcgtggtttgtatgcaccacgacacccgttttcggaatgggtgacgtgcgacaacgaaattgcgcgaaaccaccccaaacatgagtttaggacctaaagtagtggattgggcatgttcgttgcgaaaaacgaagaaatggttcaggtggcaaaaactcgtgcttttatgcactcgacacccgttttcggaatgggtgacgtgcggaaacgaaattgcgcgaaaccaccccaaacatgagttttggacctaaagtagtggattgggcatgtgcgttgcgaaaaacgaagaaatggttccggtggcaaaaactcgtgcttttatgcacccgacacccgttttcggaatgggtgacatgtgacaacgaaattgcgcaaaaccaccccaaacatgagttttgtacctaaagtagtggattgggcatgttcgttgcgtaaaacgaagaaatggttccggtggcaaaaacttgtgctttgtatgcaccacgacacccgttttcggaatgggtgacgtgcgacaacgaaattgcgcgaaaccaccccaaacatgagttttggacctaaagtagtggattgggcatgttcgttgcgaaaaacgaagaaatggttccggtggcaaaaactcgtgcttttatgcacccgacacccgtttttggaatgggtgacatgtgacaacgaaattgcgcgaaaccaccccaaacatgagttttgtacctaaagtagtggattgggcatgttcgttgcgtaaaaaaaaaaaaatggttccggtggcaaaaacttgtgctttgtatgcaccacgacacccgttttcggaatgggtgacgtgcgacaacaaaattgtgcgaaaccaccccaaacatgagttttgtacctaaagtagtggattgggcatgttcgttgcgaaaaatgaagaaatggttccggtggcaaaaactcgtggtttgtatgcaccacgacacccgttttcggaatgggtgacgtgcgacaacaaaattgcgcgaaaccaccccaaacatgagtttaggacctaaagtagtggattgggcatgttcgttgcgaaaaacgaagaaatggttcaggtggcaaaaactcgtgcttttatgcactcgacacccgttttcggaatgggtgacgtgcggaaacgaaattgcgcgaaaccaccccaaacatgagttttggacctaaagtagtggattgggcatgtgcgttgcgaaaaacgaagaaatggttccggtggcaaaaactcgtgcttttatgcacccgacacccgttttcagaatgggtgacgtgtgacaacgaaattgcgcgaaaccaccccaaacatgagttttgtacctaaagtagtggattgggcatgttcgttgcgaaaaatgaagaaatggttccggtggcaaaaactcgtggtttgtatgcaccacgacacccgttttcggaatgggtgacgtgcgacaacgaaattgcgcgaaaccaccccaaacatgagttttggacctaaagtagtggattgggcatgttcgttgcgaaaaacgaagaaatggttccggtggcaaaaactcgtgcttttatgcacccgacacccgttttcggaatgggtgacgtgcgacaacgaaattgcgcgaaaccaccccaaacatgagttttggacctaaagtagtggattgggcatgttcgttgcgaaaaacgaagaaatggttccggtggcaaaaacttgtggtttgtatgcaccacgacacccattttcagaatgggtgacgtgcgacaacgaaattgcgcgaaaccaccccaaacatgagttttgtacctaaagtagtggattgggcatgttcgttgcgaaaaacgaagaaatggttctggtggcaaaaactcgtgcttttatgcacccgacacccgttttcggaatgggtgacatgtgacaacgaaattgcgcgaaaccaccccaaacatgagttttgtacctaaagtagtggattgggcatgttcgttgcgaaaaaacgaagaaatggttccggtggcaaaaactcgtgctttgtatgcaccacgacacccgttttcagaatgggtgacgtgtgacaacgaaattgcgcgaaaccaccccaaacatgagttttgtacctaaagtagtggattgggcatgttcgttgcgaaaaacgaagaaatggttccggtggcaaaaattcgtgcttttatgcactcgacacccgttttcggaatgggtgacgtgcggaaacgaaattgcgcgaaaccacccaaacatgagttttggacctaaagtagtggattgggcatattcgttacgaaaaacgaagaaatggttccggtggcaaaaactcgtgctttgtatgcaccccgacaaccgttttcagaatgggtgacgtgcggcaacaaaattgtgcgaaaccaccccaaacatgagttttgtacctaaagtagtggattgggcatgtccgttgcgaaaaacgaagaaatggttccggtggcaaaaactcgtgctttgtatgcaccccgacacccgttttgggaatgggtgacgtgcgacaacaaaattgcgcgaaaccaccccaaacatgagttttggacctaaaatagtgtattgggcatgttcgttgcgaaaaacgaagaaatagttccggtggcaaaaattcgtgcttttatgcactccacacccgttttcggaatgggtgacgtgcggaaacgaaatttcgcgaaaccaccccaaacatgagttttggacctaaagtagtggattgggcatgttcgttaggaaaaaaggaagaaatggttccggtggcaaaaactcgtgcttttatgcacccgacaatcgtttttggaatgagtgacgtgcggcaacaaaattgcgcgaaaccaccccaaacatgagttttgtacctaaagtagtggattgggcatgttcgttgcgaaaaaagaagaaatggttccggtggcaaaaaatcgtgctttgtatgcaccccgacacccgttttcggaatgggtgacgtgcgacaacgaaattgcgcgaaaccaccccaaacatgagttttggacctaaagtagtagattgggcatattcattgcgaaaaacgaagaaatggttccggtggcaaaaactcgtgctttgtatgcacccgccacccgttttaggaatgggtgacgtgcgacaacgaaattatgcgaaaccactccaaacatgagttttggacctaaagtagtggattgggcatgttagttacgaaaaacgaagaaatggttccggtggctaaaactcgtgcttttatgcacccgacacccgttttcagaatgggtgacgtgtgacaacgaaattgcgcgaaaccaccccaaacatgagttttgtacctaaagtagtggattgggcatgttcgttgcgaaaaatgaagaaatggttccggtggcaaaaactcgtgctttgtatgcaccacgacacccgttttcggaatgggtgacgtgcgacaacgatattgcgcgaaaccaccccaaacatgagttttggacctaaagtagtggattgggcatgttcgttgcgaaaaacgaagaaatggttccggtggcaaaaatccgtgctttgtatgcacccgacacccgttttcggaggtgacgtgcgacaacgaaattgcgcgaaaccaccccaaacatgagttttggacctaaagtagtggattgggcatgttcgttgcgaaaaacgaagaaatggttccggtggcaaaaatccgtgctttgtatgcacccgacacccgttttcggaatgggtgacgtgcgacaacgatattgcgcgaaaccaccccaaacatgagttttggacctaaagtagtggattgggcatgttcgttgcgaaaaacgaagaaatggttccggtggcaaaaactcgtgcttttatgcaccccgacaaccgttttcagaatcggtgacgtgcggcaacgaaattgcgcgaaaccaccccaaacatgagttttgtacctaaagtagtggattgggcatgttcgttgcgaaaaacgaagaaatggttccggtggcaaaaactcgtgctttgtatgcacccccgacaaccgttttcagaatgggtgacgtgcgacaacaaaattgcgcgaaaccaccacaaacatgagttttggacctaaagtagtggattgggcatgttcgttgcaaaaaacaaaaagtggttccggtggcaaaaactcgtgcttttatgcaccccgacaaccgttttcagaatcggtgacgtgcggcaacgaaattgcgcgaaaccaccccaaacatgagttttggacctaaagtagtggattgggcatgttcgttgcgaaaaacgaagaaatggttccggtggcaaaaactcgtgcttttatgcacccccgacaaccgttttcggaatgagtgacgtgcgacaacgaaattgcgcgaaaccaccacaaacatgagttttggacctaaagtagtggattgggcatgttcgttgcaaaaaacgaaaaaatggttccggtggcaaaaactcgtgcttttatgcacccgacacccgttttcggaatgggtgacgtgcggcaacgaaattgcgcgaaaccaccccaaacatgagttttggacctaaagtagtggattgggcatgttcgttgcgaaaaacgaagaaatggttccggtggcaaaaactcgtgctttgtatgcaccccgacaactgttttcagaatgggtgacgtgcggcaacgaaattgcgcgaaaccaccccaaacatgagttttggacctaaagtagtggattgggcatgttcgttgcgaaatacgaagaaatggttccggtggcaaaaactcgtgcttttatgcacccgacacccgttttcggaatgggtgacgtgcggcaacgaaattgcgcgaaaccaccccaaacatgagtgttgtacctacagtagtggattgggcatgttcgttgtgaaaaacgaagaaatggttccggtggcaaaaactcgtgctttgtatgcaccccgacaaccgttttcagaatgggtgacgtgcggcaacgaaattgcgcgaaaccaccccaaacatgagttttggacctaaagtagtggattgggcatgttcgttgcgaaaaacgaagaaatggttccggtggcaaaaactcgtgctttgtatgcaccccgacaaccgttttcagaatgagtgacgtgcggcaacgaaattgcgcgaaaccaccccaaacatgagttttggacctaaagtagtggattgggcatgttcgttacgaaaaacgaaggaatggttccggtggcaaaaactcgtgcttttatgcacccgacactcgttttcggaatgagtgacgtgcggcaacgaaattgtgcgaaaccaccccaaacatgagttttgtacctaaagtagtggattgggcatgttcgttgcgaaaaacgaagaaatggttccggtggcaaaaactcgtgctttgtatgcaccccgacaactgttttcagaatgggtgacgtgcggcaccgaaattgcgcgaaaccaccccaaacatgagttttggacctaaagtagtggattgggcatgttcgttgcgaaaaacgaagaaatggttccggtggcaaaaactcgtgcttttatgcacccgactcccgttttcggaatgggtgacgtgcggcaacgaaattgcgcgaaaccaccccaaacatgagtgttgtacctaaagtagtggattgggcatgttcgttgcgaaaaacgaagaaatggttcctgataaacccaacgggtagaagggtgcccgatctttcgatgagagatgatggtggtggaaaacttgttggagaacgactgatgaggacatcactatgagtacgactacaccagcagcacctccacatcaagcgccacttccttcattagctgggccaatcactcgggcccgtgcaagagatcttaacttcgtcatgctactaaagaatgatggcccagaagaatagacgaccagcccaactgcggcccatagtggacgacctagggttggccgcccctaggggctgcgccccctctatttatccaggagctgcgcctcctttattctcgagttttgttttacgttagccttagctactctcgaacacgcgcaaatctgcgctgtcttcgtgtattcagaactccaccctcgagtaatagattagattgctcgcatcttgttcttgttcgttcttcgattgcgcacaggaaacgatcttcgtgatcaggccgatctcgcatcagcaaggtcggtaaccacagggagttggttcagcgattgcattggcgcctcgggcttgctcgtcgtagtcggatcgcaagggtcatcttccgccaaatcggaattatctctactcgccgaaagatcgggcacctcagctacatcaattggtatcagatttccaggttgatcggtgagtttatcgagcgtttttttcctacagtccacaaaaccacataaaaattcaggttagatcttatcccagcacccttttgagcctcgcactttctttcaataatctgcattgttgaatttgtgtgctttcgcgtttccttgttgctggttgcattgtgttcttccaccattcaaatcctagcgccgccaccatctcccatttgatcacgccacaaaccgagtcaacatcgtctccttgtttttctccttcgattacgtcaaaaagaaaacagaaaaaacaaaccgagtcaacgaccgtttccttgattttctccttcggttacaaaaaaaaacagaaaaaaaaacaaaccgagtcaacgaccgcttgtttttctccttcggttacataaaaaaaccgaaacaaaaaaaaagaagacgaaagagaaaggatacggttgtttcatcccggtagttt

SEQ ID NO: 590 - DNA, 8158 bp, Zea mays
  VARIATION (8057)..(8057): /replace="c" or "g" or "t"
  misc_feature (8057): /note="Nucleotide given in the sequence has no preference with respect to those in the annotation for said position"
  VARIATION (8074)..(8074): /replace="c" or "g" or "t"
  misc_feature (8074): /note="Nucleotide given in the sequence has no preference with respect to those in the annotation for said position"
  source: /note="Zea mays BAC clone full insert sequence contig bacm.pk007.b16.fis24"
ggttgcacgtggcattattgtcagaaagctaagtcacggttgaacaaccatggtttgtatatgcctttgcctgttcctacttccccttggatggatatttcgatggattttgttttgggattgcctagaactaagaaggggagggatagcatttttgtggttgttgatcgattctccaaaatggctcatttcataccttgtcataagactgatgatgctagcaatgttgctgaattgttttttagagagattattcgtttgcacggtattcccaatacaatagtctcggatcgtgatgccaagtttctgagtcatttttggagatctctgtggaataaattaggaactaaattgctgtttagcaccacttgtcaccctcagactgatggtcaaactgaggtagttaatcgaactttgttgatgaagctgaggtgcccgatctttcggcgagtagagataattccgatttgtcggaagatgacccttgcgatccgactacgactagcaagcccgaggcgccaatgcaatcgctgaaccaactccctgtggttaccgaccttgctgatgcgagatcggcctgatcacgaagatcgtttcctgtgcacaatcgaagaacgaacaagaactagatgcgagcaatctaatctattactcgagggtggagttctgaatacacgaagacagcgcagatttgcgcgtgttcgagagtagctaaggctaacgtaaaacaaaactcaggaaataaaggaggcgcagctcctgaataaatagagagggggcgcagcccctaggggcggccaaccctaggtcgtccattatgggccgcaattgggctggtcgtctattcttccgggccttcgttctttaacaacatgatgtagttcaattctcttgcacgggcccgagtcactggcccaggtggaaagggtggcgcctgggctggagaaggtgctgctggtgtagatgtgctcgtgttggtgttgatgtccgcatcatcctccccttcttgaactgaagtcgtcctcgacggcaactcctcatcttctcccgcatacggtttcaaatctgcaacattaaaactagtggaaacaccaaactccgcaggtaggtcgagggtataagcattatcattaatcttggttagtatcttaaaaggaccagcagcacgaggcatcaatttagaacggcgcaatgtaggaaaacgatcctttctcaaatgcaaccaaaccatatcaccaggttcaaaagtaacatgttttcttcctttactaccagcaacctgattttttgtattagtagcagcaatgttctgtttcgtttgttcatgtatggtaatcatttgttcaacatgtgcagaagcatctacatgtggggcgttcgcagcattaagtgaaatcaaatcaataggtgccctaggaatgtaaccataaacaatctggaaagggcacatctttgtagaagaatgcgtggcatgattgtaagcaaattcaacatgagacaagcaatcctcccaacgtctcaaattcttgtctaaaacagccctaagcatggtagataaagttctatttactacctcagtttgtccatcagtctgagggtgacaagtagtgctaaacaacaatttagttcccaatttattccaaagagatctccaaaaatggcttagaaacttagcatcgcgatcagagactattgtttttggaataccatgtaaacgaataatttctctaaagaacaattcagcaacaatgctagcatcatcagttttatgacaaggtataaagtgagccattttagagaatctatcaacaaccacaaaaatactatccctccccttcttagttctaggcaagcccaaaacaaagtccatagagatatcaagccaaggagaagaagggacaggcaaaggcatatacaaaccatggttgttcaaccgtgacttagctttctgacaagtagtgcagcgtgcaacaaggcgctccacatcagcgcgcatccgaggccaaaagaaatgggcagccaacacctcatgtgtcttgtagacgccaaaatgccccatgagaccgcctccatgcgcttcctgtaacaacaaaagacgaaccgagctagctggaacacacagcttgttagagcgaaacaggaacccatcctgtatgtgaaatttgccccatggtttcccattaatacaatggccgaaagcatctttaaaatcagcatcgtcaacatattgatccttcacagtgtccaaaccaaagattttaaaatctaactgtgacagcatggtatagcgacgagacaaagcatcagcaataacattgtccttcccgttcttgtgtttaataatgtaaggaaaggactcaatgaattctacccatttagcatgacgacggttcagatttgtttgggtgcgaatatgttttaaagcctcatgatcagaatggattataaactcacgatgccaaagatagtgctgccatgtatgcaaagtgcgcactaaagcgtaaagctccttatcataagtagaatatttcagactagcaccgcttaatttttcactaaaataagcaactggttttccttcttgtaacaaaacagcacctagcccaataccgctagcatcgcattcaagctcaaacactttattaaaatcaggcaattgcaataggggagcttgggttaacttatctttcaaagtgctgaacgctacctcctgcgaatcactccaagcaaacgacacatctttctttgtaagctcatgtagaggcgctgcaatggagctaaaatcacgaacaaatctgcggtagaaaccggcaagtccaagaaaactccgaatttgtgtgaccgtcgtcggtgtaggccactcccgaatggcagcaatcttgctgctatccacctcaatgccctgcggagtaaccacataaccaagaaacgagacacgttgcgtgcaaaatgtgcacttttccatgttaccaaacaagcgagcagcacgcaaagcgtcaaaaacagcacgcaaatgttctaaatgctcctctatagacttgctgtaaataaggatatcatcgaaataaacaacaacaaacaaacctatgaaggcccgtagaacttcgttcattaaacgcataaaggtgctgggagcattagtcaatccaaatggcataaccaaccattcatataaaccaaattttgttttaaaagccgttttccattcatcaccgagtttcattctaatctgatggtaaccgctacgcaaatcaaccttagagaaaataacggcaccactaagctcatctagcatatcatcaaggcgtggaataggatatcgataacgaactgtgatgttattaatagcacgacaatctacgcacatacgccatgacccatctttctttgggacgagtaaaacaggaaccgagcaagggctaagagactcacgaatgtaacccttatcaagcagcgtctgcacctggcgctggatctccttcgtctcatctggatttgtacggtacggggcgcggttcggaagagaagcgccggggatgagatcgatctgatgctcaatgccacggaggggaggaagacccggtggtaagtccgtaggataaacatcagcatactcctgcaaaaggttaacaacagcagggggtatatccaaagacggtgcatcatcaagcggaacaagcattcgcgagcatacaagtgcataacagggcatatgagcttcatggagatcatcaaaatcagcacgtgtagcaagtaaaacaggagagtgcaacttgatttcagatttaataagtgcggctgatgtcgatttgacttgttgtgcagttttagcagccctagtaagatcatctttcaaaatttggtcaggggtcattggatgtataattattttctggcctttaaacatgaaagaataatgatttgaacgaccatgatgtaaactatcagtatcatattgccaaggtcgacctaataacaaagagcatgcttccataggaataacatcgcaatcagcataatcagaataagaacccagcgaaaaggggacacgtaccgaacgtgttacctttattttaccaccatcattaagccattgaatgtgatacggatgtggatgtgtgcgagtgggcaaggataatttctctaccaacgctgtacttgccaaattgttgcagctgccactatcgatgatgatgcgaatcgaccgttcgtgcacgacgcccttggtatggaatagagtgtgtcgctgatttttttcggcctgggcaacctgtgtgctgagaacacgctgcacaacaagactctcatacctatcggcgtcgataggatcaacgtggacttcctcattttctgcatggttagtggcaatcatagcatgactagtttcctcagaatcactggctgaagagtactcaccattgtcacgtataagcaaggtacgcttgtttgggcagtcccgaatcatatgcccaaaccctctacaacgatggcactgaatatcccgtgtacgtcctgtggaagaagcggcgcctttggcagggggcgccactggcttggtcgtccctgtgcgcgatgtagtgctaggcgtagaaggtgcagggctggaaggagttgagctgtgtgttggaccccggcctgcaagagagttagtatatgtctttgatcgtcgtccctgcacttcacgttcagctttgcaagcatattcaaacaatgtggttatatcaaaataatccttataatcaagtatatcctgaatttccctgttcaaaccaccacgaaaacgcgccatagcagcgtcatccgactcaactaaaccacaacgaagcatacccttttgtaactcctggtaataatcctcaacagactgtgaaccttattgaaaacgctgcattttgttaagcaaatcacgagcataataggaaggaacaaatctgtggcgcatggcagtttttaattgggtccaagtaatgacactgttaatgggaagtttttgtttatactcacgccaccaaattaaagcaaaatcagtaaattcactaatggcagccttcacttggctattagcaggaatatcatggcatgaaaatttctgttctacctctaattcccaatcaagatatgcagcaggatcatatttaccattaaaagatggaattttaaatttaatcttagaaaataagtcattagggggatgacgaaccacacgacgtgcacgaccacggcgatctccatcgtcctgctcagtgtcaccgccgtattcctgctccatctttgtggtcagtgcatcaaggcgtgccaggatggtgtcgagtgtggtgcgagtcgccgtttgagcaaggtcaagttggttgaaacgctcgatcgtcgaagtgatcgttgaatcaagccgttcatgcaccgtcctaatgtcagcagcaagtccatcaacttgtccccttacttcctggcattcctgcaactgggcatccaccatgtcgtgtgctcctgccatagttagcgcaaacaccaaaaggagaaaaaccaacgacaaaaacaggggtgtactgctcacaaggcgctcacactagtgctgttataaagtttttatccgttcttaccaagccacagtggtgaactgcaaccaacaggtggaaccggtgaaagattggatgagcgattgcgtggagaaacagaaacctgctcgtcgtagaaatatgtggagttgtgggtaggctgcactcaagtcaaggattagcacgatcaaacaataatgcaaagttgaattatagtgcaaaacacgaaactatattgctggccacaggtgcaaaggatggatggaactagcagaatggcagtaccgtaaatattgtactagtgatgccaaaaaggcactagtagaaatcacaggtgattttgtttttctttttttttatgatttttttgatatttttctcagcacaagaagcaacaagataggagctacacgaagtttcacctaaaacagatatcagatgtggtctacagaaaatcaggaagttctctgaaaagcgtgcgagaactttgacggatttttttctttattttcctgaatttttttgacaattttgtcgaaccccaaacagaccgtaggtttgcttggccgggctcagaatggtgtcaactagctcctgtaaaaatttcagattttttggacacccgagcgaaaagttatgcccggtttacggaaggtacctcaagttatgttctaaaaacgaccgggatgaaacaaccgtatcctttctccttcgttatctttttttttctgttttttttgacgtaaccgaaggagaaaaacaaggaaggttgactcggtttgttttttttctgttttttttcgtaaccgaaggagaaaatcaaggaaacggtcgttgactcggtttgttttttctgttttttttttgacgtaaccgaaggagaaaaataaggaaacgatgttgactcggtttgtggcgtgatcaaacgggagatggtggcggcgctagggtttgaatggtggaagaacacaatgcaaccagcaacaaatgacgcgaaagcacacaaattcaacaatgcagattattgaaagaaagtgcgaggctcaaaagggtgctgggataagatctaacctgaatttttatgtggttttgtggactgtaggaaaaaaacgctcgataaactcaccgatcaacctggctctgataccaattgatgaagctgaggtgcccgatctttcggcgagtagagataattccgatttgtcggaagatgacccttgcgatccgactacgacgagcaagcccgaggcgccaatgcaatcgctgaaccaactccctgtggttaccgaccttgctgatgcgagatcggcctgatcacgaagatcgtttcctgtgcgcaatcgaagaacgaacaagaactagatgcgagcaatctaatctattactcgagggtggagttctgaatacacgaagacagcgcagatttgcgcgtgttcgagagtagctaaggctaacgtaaaacaaaactcaggaaataaaggaggcgcagctcctgaataaatagagagggggcgcagcccctaggggcggccaaccctaggtcgtccattatgggccgcaattgggctggtcgtctattcttccgggccttcgttctttaacaacatgatgtagttcaattctcttgcacgggcccgagtcactggcccaggtggaaagggtggcgcctgggctggagaaggtgctgctggtgtagatgtgctcgtgttggtgttgatgtccgcatcatttgtctaccatgcttagggctgttttagacaaaaatttgaaacgttgggaggattgcttacctcatgttgagtttgcttataatcatgcaacacattcttctacaaagatgtgcccttttcaaattgtttatggttacattcctagggcgcctattgctttgttttcgcttgatgctacggatgccccacacatagatgctcttgcacatgttgaacaaatgattaatctccatgaacaaactcaacaaaacattgctgctgctaatgctaaatatcagattactggtagtaaaggccggaaactagttacttttgaacctggtgatatggtttggttgcatttgagaaaggatcgttttcctattttgcgccgttctaaattgatgcctcgtgctgctggtccttttaaggtactaaccaagattaatgataatgcttatatccttgacctgcctgcggagtttggtgtttccactagttttaatgttgcagatttgaaaccgtatgcgggagaagatgaggagttgccgtcgaggacgacttcagttcaagaaggggaggatgatgaggacatcaacaccaacacgagcacatctacgccagcagcaccttctccagcccaggcaccatcttccccagtccaggcgccaccccttccacctgggccagtgactcgggcccgtgcaagagaattgaactacatcatgttgttaaagaacgaaggcccggaagaatagacgaccagcccaattgcggcccataatggacgacctaaggttgcgccccccctaaggggctgcgcccccctctctatttatacaggagctgcgcctcttttattttgccagttttgttttacattagctttagctactc

SEQ ID NO: 591 - DNA, 676 bp, Zea mays
  VARIATION (1)..(1): /replace="c" or "g" or "t"
  misc_feature (1): /note="Nucleotide given in the sequence has no preference with respect to those in the annotation for said position"
  VARIATION (5)..(77): /replace="c" or "g" or "t"
  misc_feature (5)..(77): /note="Nucleotides given in the sequence have no preference with respect to those in the annotations for said positions"
  source: /note="Zea mays BAC clone full insert sequence contig bacm.pk128.j21.fis1"
agacaaaaaaaaaaaaaaaaaaaaaaaaaaaaaaaaaaaaaaaaaaaaaaaaaaaaaaaaaaaaaaaaaaaaaaaaacaacgaacatgcccaatccactactttaggtccaaaactcttcgtttttcgcaacgaacatgcccaatccactactttaggtccaaaactcatgtttggggtggtttcgcgcaatttcgttgtctcacgtcaccctttccgaaaacgggtgtcgggtgcatacaaagcacgagtttttgccaccggaaccatttcttcgtttttcgcaacgaacatgcccaatccactactttaggtccaaaactcatgtttgggggtggtttcgcgcaatttcgttgtcgcacgtcacacattccgaaaacgggtgtcggggtgcatacaaagcacgagtttttgccagcggaaccatttcttcttttttcgtaacgaacatgcccaatccactactttaggtccaaaactcatgtttgaggtggtttcgcgcaatttcgttgtcgcacgtcaaccattctgaaaactggtatcggggtgcataaaagcacgagtttttgccaccggaaccatttcttcgtttttcgcaacgaacatgcccaatccactactttaggtccaaaactcatgtttggggtggtttcgcgcaatttcgttgtcccacgtcc

SEQ ID NO: 592 - DNA, 686 bp, Zea mays
  VARIATION (4)..(104): /replace="c" or "g" or "t"
  misc_feature (4)..(104): /note="Nucleotides given in the sequence have no preference with respect to those in the annotations for said positions"
  source: /note="Zea mays BAC clone full insert sequence contig bacm.pk128.j21.fis2"
tcgaaaaaaaaaaaaaaaaaaaaaaaaaaaaaaaaaaaaaaaaaaaaaaaaaaaaaaaaaaaaaaaaaaaaaaaaaaaaaaaaaaaaaaaaaaaaaaaaaaaaaccggtggcaaaaactcgtgctttgtatgcaccctgacaacccgttttcggaatgtgtgacgtgcgataacgaaattgcgcgaaacaaccccaaacatgagttttggacctaaagtagtggattgggcatgttcgttgcgaaaaacgaagaaatggttccggtggcaaaaactcgtgctttgtatgcaccccgacaaccggttttcggaatgggtgaagtgcgacaacgaaattgcgcgaaaccaccccaaacatgagttttggacctaaagtagtggattgggcatgttcgttgcgaagaacgaagaaatggttccggtggcaaaaactcgtgctttgtatgcacccgacacccgttttcggtatgggtgacgtgcgacaacgaaattgcacgaaaccaccacaaacatgagttttggacctaaagtagtggattgggcatgttcgttgcgaaaaacgaagaaatggttccggtggcaaaaactcgtgctttgtatgcacccccgacaaacccgttttcggaatgtgtgacgtgcgacaacgaaattgcgcgaaaccaccccaaacatgagttttggagcta

SEQ ID NO: 593 - DNA, 1193 bp, Zea mays
  source: /note="Zea mays BAC clone full insert sequence contig bacm.pk128.j21.fis3"
gatcaaaccgggaggcgacgatcgataccttgattttgacggatttttttctttattttcctgaatttttttgacaattttgtcgaacccaaacagaccgaaggtgagtttggccggcctcagaatggtgtcaactagctcctgtaaaaatttcagatttttcggacacccgagcgaaaagttatgcccggtttaaggaaggtacctcaagttatgttttcaaacgaccgggatgaaacaaccgtatcctttctccttcgttgtttttttttgtttctgttttttttttgacgtaaccgaaggagaaaaacaaggaaacgatgttgcctcggtttttttttttctgttttttttcgtaaccgaaggagaaaaacaaggaaacggccgttgactccgtttgttttttctgtttttttttacgtaaccgaaggagaaaaacaaggaaacaatgttgactcggtttgtggcgtgatcaaaggggagatggtggcggcgctaggatatgaatggtggaagaacacaatgcaaccagcaacaaggaaacgcgaaagcacacaaattcaacaatgcagattattgaaagaaagtgcgaggctcaaaagggtgctcggataaggtctaacctgaatttttatgtggttttgtggactgtaggaaaaaaaaactcgataaactcaccgatcaacctggaaatctgataccaattgatgaagctgaggtgcccgatctttcggcgagtagagataattccgatttgcggaagatgacccttgcgatccgactacgacgagcaagcccgaggcgccaatgcaatcgctgaaccaactccctgtggttaccgaccttgctgatgcgagatcggcctgatcacgaagatcgtttcctgtgcgcaatcgaagaacgaacaagaacaagatgcgagcaatctaatctattactcgaaggtggagttctgaatacacgaagacagcgcagatttgcgcgtgttcgagagtagctaaggctaacgtaaaacaaaactcggaaaataaaggaggcgcagctcctgtataaatagagagggggcgcagccctaggggcggccaaccctaggtcgtccataatgggccgcaattgggctggtcgtctattcttctgggccttcgttctttaacaacatgatgtagttcaattctcttgcacgggcccgagtc

SEQ ID NO: 594 - DNA, 1040 bp, Zea mays
  source: /note="Zea mays BAC clone full insert sequence contig bacm.pk128.j21.fis4"
ctgcgtttttcgcaacgaacatgcccaatccactactttaggtccaaaactcatgtttgaggtggtttcgcgcaatttcgttgtcgcacgtcaccctttccgaaaacgggtgtcgggtgcatacaaagcacgagtttttgccaccggaaccatttcttcgtttttcgcaacgaacatgcccaatccactactttaggtccaaaactcatgtttggggtggtttcgcgcaatttcgttgtcgcacgtcacacattccgaaaacgggttgtcggggtgcatacaaagcacgattttttgccaccggaaccatttcttcttttttcgcaacgaacatgcccaaaccactactttaggtccaaaacttatgtttggggttgtttcgcgcaatttcgttatcgcacgtcacacattccaaaaacggttgtcggggtgcatacaaagcacgattttttgccaccggaaccatttcttcttttttcgcaacgaacatgcccaatccactactttaggtccaaaactcatgtttggggtggtttcgcgcaatttcgttgtcgcacgtcaccctttccgaaaacgggtgtcgggtgcatacaaagcacgagtttttgccaccggaaccatttcttcgtttttcgcaacgaacatgcccaatccactactttaggtccaaaactcatgtttggggtggtttcgcgcaatttcgttgtcgcacgtcaccctttccgaaaaagggtgtcgggtgcatacaaagcaccagtttttgccaccggaaacattttttccttttttgcaacaaacatgcccaaaccactactttaagtccaaaaatcaagtttgggggggtttctcgcaatttttttgtcacacgtcacacatttcaaaaaaaggttgtcggggggcataaaaaacaagaattttttccaccagaaacattttttcttttttcacaaaaaaaaagcccaaacccctactttagggccaaaacatatttttggggttgtttcgcaaaattttcttatccaccgcaacattccaaaaag

SEQ ID NO: 595 - DNA, 2686 bp, Zea mays
  source: /note="Zea mays BAC clone full insert sequence contig bacm.pk128.j21.fis5"
ccattctgaaaacgggtatcgaggtgcataaaagcacgagtttttgccaccggaaccatttcttcgtttttcgcaacgaacatgcccaatccactactttaggtccaaaactcatgtttggggttgtttcgcgtaatttcgttgtcgcacgtcacccattccgaaaacgggtgtcggggtgcatacaaagcacgagtttttgccatcggaaccatttcttcgtttttcgcaacgaacatgcccaatccactactttaggtccaaaactcatgtttggggtggtttcgcgcaatttcgttgtcgcacgtcacccattccgaaaacgggtgtcgggtgcacaaagcacgagtttttgccaccggaaccatttcttcgtttttcgcaacgaacatgcccaatccactactttagctccaaaactcatgtttggggtggtttcgcgcaatttcgtatgtcgcacgtcacacattccgaaaacgggtttgtcgggggtgcatacaaagcacgagtttttgccaccggaaccatttcttcgtttttcgcaacgaacatgcccaatccactactttaggtccaaaactcatgtttggggtggtttcgtgcaatttcgttgtcgcacgtcacacattccgaaaacgggttgtcggggtgcatacaaagcacgagtttttgccaccggaaccattgcttcgtttttcgcatcgaacatgcccaaacaactactttaggtccaaaacttatgtttggggttgtttcgcgcaatttcgttatcgcacgtcacacattccgaaaacggttgtcggggtgcatacaaagcacgagtttttgccaccggaaccatttcttcgtttttcgcaacgaacatgcccaatccactactttaggtccaaaactcatgtttggggtggtttcgcgcaatttcgttgtcgcacgtcacacattccgaaaacgggtgtcgggtgcatacaaagcacgagtttttgccagcggaaccatttcgtcgtttttcgcaacgaacatgcccaatccactactttaggtccaaaactcatgtttgaggtggtttcgcgcaatttcgttgtcgcacgtcaaccattcagaaaacaggtatcgaggtgcataaaagcacgagtttttgccaccggaaccatttcttcttttttcgcaacgaacatgcccaatccactactttaggtccaaaactcatgtttggggtggtttcgcgcaatttcgttgtcgcacgtcaccctttccgaaaacgggtgtcgggtgcatacaaagcacgagtttttgccaccggaaccatttcttcgtttttcgcaacgaacatgcccaatccactactttaggtccaaaactcatgtttggggtggtttcgcgcaatttcgttgtcgcacgtcaccctttccgaaaatgggtgtcgggtgcatacaaagcacgagtttttgccaccggaaccatttcttcgtttttcgcaacgaacatgcccaatccagtactttaggtccaaaactcatgtttggggtggtttcgcgcaatttcgttgtcacacgtcacacattccgaaaacgggttgtcggggtgcatacaaagcacgagtttttgccaccggaaccatttcttcgtttttcgcaacgaacatgcccaaaccactactttaggtccaaaacttatgtttggggttgtttcgcgcaatttcgttatcgcacgtcacacattccgaaaacggttgtcggggtgcatacaaagcacgagtttttgccaccagaaccatttcttcgtttttcgcaacgaacatgcccaatccactactttaggtccaaaactcatgtttggggtggtttcacgcaatttcgttgtcgcacgtcacacattccgaaaacgggtgtcgggtgcatacaaagcacgagtttttgcaagcggaaccatttcgtcgtttttcgcaacgaacatgcccaatccactagtttaggtccaaaactaatgttgaggtggtttcgcgcaatttcgttgtcgcacgtcacccattctgaaaacgggtatcgaggtgcataaaagcacgagtttttgccaccggaaccatttcttcgtttttcgcaacgaacatgcccaatccactaccttaggtccaaaactcatgtttggggtggtttcgcgcaatttcgttatcgcacgtcaccctttccaaaaacgggtgtcgggtgcatacaaagcacgagtttttgccaccggaaccatttcttcgtttttcgcaacgaacatgcccaatccactactttaggtccaaaactcatgtttggggtggtttcgcgcaatttcgttgtcgcacgtcacacattccgaaaacgggttatcggggtgcatacaaagcacgagtttttgccaccggaaccatttcttcgtttttcgcaacgaacatgcccaatccactactttaggtccaaaactcatgtttggggttgtttcgcgtaatttcgttatcgcacgtcacccattccgaaaacgggtgtcggggtgcatacaaagcacgagtttttgccagcggaaccatttcttcgttttcgtaacgaacatgcccaatccactactttaggtccaaaactcatgtttgaggtggtttcgcgcaatttcgttgtcgcacgtcacccattctgaaaacaagtatcgaggtgcataaaagcacgat

SEQ ID NO: 596 - DNA, 2968 bp, Zea mays
  source: /note="Zea mays BAC clone full insert sequence contig bacm.pk128.j21.fis6"
tgacgtgcgacaacgaaattgcgtgaaaccaccccaaacatgagttttggacctaaactagtggattgggcatgttcgttgcgaaaaacgacgaaatggttccgctggcaaaaactcgtgctttgtatgcacccgacacccgttttcggaatgtgtgacgtgcgacaacgaaattgcgcgaaaccaccccaaacatgagttttggacctaaagtagtggattgggcatgttcgttgcgaaaaacgaagaaatggttccggtggcaaaaactcgtgctttgtatgcacccgacacccgtttttggaaagggtgacgtgcgataacgaaattgcgcgaaaccaccccaaacatgagttttggacctaaagtagtggattgggcatgttcgttgcgaaaaacgaagaaatggttccagtggcaaaaactcgtgcttttatgcacctcgatacccgttttcagaatgggtgacgtgcgacaacgaaattgcgcgaaaccacctcaacattagttttggacctaaagtagtggattgggcatgttcgttgcgaaaaacgacgaaatggttccgctggcaaaaactcgtgctttgtatgcacccgacacccgttttcggaatgtgtgacgtgcgacaacgaaattgcgtgaaaccaccccaaacatgagttttggacctaaagtagtggattgggcatgttcgttgcgaaaaacgaagaaatggttccggtggcaaaaactcgtgctttgtacgcaccccgacaaccgttttcggaatgtgtgacgtgcgataacgaaattgcgcgaaacaaccccaaacataagttttggacctaaagtagtggattgggcatgttcgttgcgaaaaacgaagaaatggttccggtggcaaaaactcgtgcttttatgcacctcgatacccgttttcagaatgggtgacgtgcgacaacgaaattgcgcgaaaccacctcaacattagttttggacctaaactagtggattgggcatgttcgttgtgaaaaacgacgaaatggttccgctggcaaaaactcgtgctttgtatgcacccgacacccgttttcggaatgtgtgacgtgcgacaacgaaattgcgcgaaaccaccccaaacatgagttttggacctaaaccagtggattgggcatgttcgttgcgaaaaacgacgaaatggttccgctggcaaaaactcgtgctttgtatgcacccgacacccgttttcggaatgtgtgacgtgcgacaacgaaattgcgcgaaaccaccccaaacatgagttttggacctcaagtagtggattgggcatgttcgttgcgaaaaacgaagaaatggttccggtggcaaaaactcgtgcttttatgcacctcgatacgtattttcagaatgggtgacatgcgataacgaaattgcgcgaaacaaccccaaacataagttttggacctaaagtagtggtttgggcatgttcgatgcgaaaaacgaagcaatggttccggtggcaaaaactcgtgctttgtatgcaccccgacaacccgttttcggaatgtgtgacgtgcgacaacgaaattgcacgaaaccaccccaaacatgagttttggacctaaagtagtggattgggcatgttcgttgcgaaaaacgaagaaatggttccggtggcaaaaactcgtgcttttatgcacctcgatacccgttttcagaatgggtgacgtgcgacaacgaaattgcgcgaaaccacctcaacattagttttggacctaaactagtggattgggcatgttcgttgcgaaaaacgacgaaatggttccgctgacaaaaactcgtgctttgtatgcacccgacacccgttttcggaatgtgtgacgtgcgacaacgaaattgcgtgaaaccaccccaaacatgagttttggacctaaagtagtggattgggcatgttcgttgcgaaaaacgaagaaatggttccggtggcaaaaactcgtgctttgtatgcaccccgacaacccgttttcggaatgtgtgacatgcgataacgaaattgcgcgaaacaaccccaaacatgagttttggacctaaagtagtggattgggcatgttcgttgcgaaaaacgaaaaaaatggttccggtggcaaaaactcgtgctttgtatgcaccccgacaaccgttttcggaatgtgtgacgtgcgataacgaaattgcgcgaaacaaccccaaacataagttttggacctaaagtagtggtttgggcatgttcgatgcgaaaaacgaagaaatggttccggtggcaaaaactcgtgctttgtatgcaccccgacaacccgttttcggaatgtgtgatgtgcgacaacaaaattgcacgaaaccaccccaaacatgagttttggacctaaagtagtggattgggcatgttcgttgcgaaaaacgaagaaatggttccggtggcaaaaactcgtgcttttatgcacctcgatacccgttttcagaatgggtgacgtgcgacaacgaaattgcgcgaaaccacctcaacattagttttggacctaaactagtggattgggcatgttcgttgcgaaaaacgacgaaatggttccgttggcaaaaactcgtgctttgtatgcacccgacacccgttttcggaatgtgtgacgtgcgacaacgaaattgcgcgaaaccaccccaaacatgagttttggacctaaaccagtggatggggcatgttcgttgcgaaaaacgaagaaatggttccgctggcaaaaactcgtgctttgtatgcacccgacacccgttttcggaatgtgtgacgtgcgacaacgaaattgcgcgaaaccaccccaaacatgagttttggacctaaagtagtggattgggcatgttcgttgcgaaaaacgaagaaatggttccggtggcaaaaactcgtgctttgtacgcaccccgaatcaaggttacgatacctcgcctcgcctaaggaaac

SEQ ID NO: 597 - DNA, 3645 bp, Zea mays
  source: /note="Zea mays BAC clone full insert sequence contig bacm.pk128.j21.fis7"
tacgaaaacgggttgtcggggtgcatacaaagcacgagtttttgccaccggaaccatttcttcgtttttcgcaacgaacatgcccaatccactactttaggtccaaaactcatgtttggggttgtttcgcgtaatttcgttatcgcacgtcaaccattctgaaaacaggtatcgaggtgcataaaagcacgagtttttgccactggaaccatttcttcgtttttcgcaacgaacatgcccaatccactactttaggtccaaaactcatgtttggggtggtttcgcgcaatttcgttgtcgcacgtcaccctttccgaaaacgggtgtcgggtgcatacaaagcacgagtttttgccaccggaaccatttcttcgtttttcgcaacgaacatgcccaatccactactttaggtccaaaactcatgtttggggtggtttcgcgcaatttcgttgtcgcacgtcaccctttccgaaaacgggtgtcgggtgcatacaaagcacgagtttttgccaccggaaccatttctttgtttttcgcaatgaacatgcccaatccagtactttaggtccaaaactcatgtttggggtggtttcgcgcaatttcgttgtcgcacgtcacacattccgaaaacgggttgtcggggtgcatacaaagcacgagtttttgccaccggaaccatttcttcgtttttcgcaacgaacatgcccaaaccactactttaggtccaaaacttatgtttggggttgtttcgcgcaatttcgttatcgcacgtcacacattccgaaaacggttgtcggggtgcatacaaagcacgagtttttgccaccggaaccatttcttcgtttttcgcaacgaacatgcccaatccactactttaggtccaaaactcatgtttggggtggtttcgcgcaatttcgttgtcgcacgtcacacattccgaaaacgggtgtcgggtgcatacaaagcacgagtttttgccagcggaaccatttcgtcgtttttcgcaacgaacatgcccaatccactggtttaggtccaaaactcatgtttggggtggtttcgcgcaatttcgttgtcgcacgtcacacattccgaaaacgggtgtcgggtgcatacaaagcacgagtttttgccagcggaaccatttcgtcgtttttcgcaacgaacatgcccaatccactagtttaggtccaaaactaatgttgaggtggtttcgcgaaatttcgttgtcgcacgtcaccctttccgaaaacgggtgtcgggtgcatacaaagcacgagtttttgccaccggaaccatttcttcgtttttcgcaacgaacatgcccaatccactactttaggtccaaaactcatgtttggggtggtttcgtgcaatttcgttgtcgcacgtcacacattccgaaaacgggttgtcggggtgcatacaaagcacgagtttttgccaccggaaccatttcttcgtttttcgcatcgaacatgcccaaaccactactttaggtccaaaacttatgtttggggttgtttcgcgcaatttcgttatcgcacgtcacacattccgaaaacggttgtcggggtgcatacaaagcacgagtttttgccaccggaaccatttcttcgtttttcgcaacgaacatgctcaaaccactactttaggtccaaaactcatgtttggggttgtttcgcgcaatttcgttatcgcacgtcacacattccgaaaacgggttgtcggggtgcatacaaagcacgagtttttgccaccggaaccatttcgtcgtttttcgcaacgaacatgcccaatccactactttaggtccaaaactcatgtttggggtggtttcgcgtaatttcgttgtcgcacgtcaccctttccgaaaacgggtgtcgggtgcatacaaagcacgagtttttgccaccggaaccatttcttcgtttttcgcaacgaacatgcccaatccactactttaggtccaaaactcatgtttggggtggtttcgcgcaatttcgttgtcgcacgtcacacattacgaaaacgggttatcggggtgcatacaaagcacgagtttttgccaccggaaccatttcttcgtttttcgcaacgaacatgcccaatccactactttaggtccaaaactcatgtttggggtggtttcgcacaatttcgttatcgcacgtcacccattccgaaaacgggtgtcgggtgcatacaaagcacgagtttttgccaccggaaccatttcttcgttttttgcaacgaacatgcccaatccactactttaggtccaaaactcatgtttggggtggtttcgcgcaatttcgttgtcgcacgtcacacattacgaaaacgggatatcggggtgcatacaaagcacgagtttttgccaccggaaccatttcttcgtttttcgcaacgaacatgcccaatccactactttaggtccaaaactcatgtttggggtagtttcgcgtaatttcgttgtcgcacgtcacccattccgaaaacgggtgtcggggtgcatacaaagcacgagtttttgccagcggaaccatttcttcgtttttcgtaacgaacatgcccaatccactactttaggtccaaaactcatgtttgaggtggtttcgcgcaatttcgttgtcgcacgtcaaccattcagaaaacaggtatcgaggtgcataaaagcacgagtttttgccaccggaaccatttcttcgtttttcgcaacgaacatgcccaatccactactttaggtccaaaactcatgtttggggtggtttcacgcaatttcgttgtcgcacgtcacacattacgaaaacgggatatcggggtgcatacaaagcacgagtttttgccaccggaaccatttcttcgtttttcgcaacgaacatgcccaatccactactttaggtccaaaactcatgtttggggttgtttcgcgtaatttcgttgtcgcacgtcacccattccgaaaacgggtgtcggggtgcatacaaagcacgagtttttgccagcggaaccatttcttcgtttttcgcaacgaacatgcccaatccactactttaggtccaaaactctagtttgaggtggtttcgcgcaatttcgttgtcgcacgtcacccattctgaaaacaggtatcgaggtgcataaaagcacgagtttttgccaccggaaccatttcttggtttttcgcaacgaacatgcccaatccactactttaggtccaaaactcatgtttggggtggtttcgcgcaatttcgttgtctcacgtcaccctttccgaaaacgggtgtcgggtgcatacaaagcacgagtttttgccaccggaaccatttcttcgtttttcgcaacgaacatgcccaatccactactttaggtccaaaactcatgtttggggtggtttcgcgcaatttcgttgtcgcacgtcacacattccgaaaacgggttgtcggggtgcatacaaagcacgagtttttgccaccggaaccatttcttcgtttttcgcaacgaacatgcccaaaccactactttaggtccaaaacttatgtttggggttgtttcgcgcaatttcgttatcgcatcaaggaaacgataccgtcgacctcgcgggtggataatacccattcccctaagtgagtcgatacgcgcgtc

SEQ ID NO: 598 - DNA, 2834 bp, Zea mays
  source: /note="Zea mays BAC clone full insert sequence contig bacm.pk128.j21.fis8"
tacttagaatgttcgttgcgaaaaacgacgaaatggttccgctggcaaaaactcgtgctttgtatgcacccgacacccgttttcggaatgtgtgacgtgcgacaacgaaattgcgcgaaaccaccccaaacatgagttttggacctaaagtagtggattgggcatgttcgttgcgaaaaacgaagaaatggttccggtggcaaaaactcgtgctttgtatgcaccccgacaacccgttttcggaatgtgtgacgtgcgacaacgaaattgcacgaaaccaccccaaacatgagttttggacctaaagtagtggattgggcatgttcgttgcaaaaaacgaagaaatggttccggtggcaaaaactcgtgctttgtatgcaccccgacaacccgttttcggaatgtgtaacgtgcgacaacaaaattgcgcgaaaccaccccaaacatgagttttggacctaaagtagtggattgggcatgttcgttgcgaaaaacgaagaaatggttccggtggcaaaaactcgtcctttgtatgcacccgacacccgttttcggaatgggtgacgtgcgacaacgaaattgcgcgaaaccaccccaaacatgagttttggacctaaagtagtggattgggcatgttcgttgcgcaaaacgaagaaatggttccggtggcaaaaactcgtgcttttatgcacatcgatacctgttttcagaatgggtgacgtgcgacaacgaaattgcgcgaaaccacctcaaacaagagttttggacctaaagtagtggattgggcatgttcgttgcgaaaaacgaagaaatggttccgctggcaaaaactcgtgctttgtatgcaccccgacacccgttttcggaatgggtgacgtgcgacaacgaaattgcgcgaaaccaccccaaacatgagttttggacctaaagtagtggattgggcatgttcgttgcgaaaaacgaagaaatggttccggtggcaaaaactcgtgcttttatgcacctcgatacctgttttcagaatgggtgacgtgcgacaacgaaattgcgcgaaaccatctcaaacatgagttttggacctaaagtagtggattgggcatgttcgttacgaaaacgaagaaatggttccgctggcaaaaactcgtgctttgtatgcaccccgacacccgttttcggaatgggtgacgtgcgataacgaaattacgcgaaacaaccccaaacatgagttttggacctaaagtagtggattgggcatgttcgttgcgaaaaacgaagaaatggttccggtggcaaaaactcgtgctttgtatgcaccccgataacccgttttcggaatgtgtgacgtgcggcatcgaaattgcgcgaaaccaccccaaacatgagttttggacctaaagtagtggattgggcatgttcgttgcgaaaaacgaagaaatggttccggtggcaaaaactcgtgctttgtatgcacccgacacccgttttcggaatgggtgacgtgcgataacgaaattgcgcgaaaccaccccaaacatgagttttggacctaaagtagtggattgggcatgttcgttgcaaaaaacgaagaaatggttccggtggcaaaaactcgtgctttgtatgcacaccgacacctgttttcagaatggttgacgtgcgacaatgaaattgcgcgaaaccacctcaaacatgagttttggacctaaagtagtggattgggcatgttcgttgcgaaaaacgaagaaatggttccgctggcaaaaactcgtgctttgtatgcaccccgacacccgttttcggaatgggtgacgtgcgacaacgaaattgcgcgaaaccaccccaaacatgagttttggacctaaagtagtggattgggcatgttcgttgcgaaaaacgaagaaatggttcaggtggcaaaaactcgtgctttgtgcacccgacacccgtttttggaatgggtgacgtgtgacaacgaaattgcgcgaaaccaccccaaacatgagttttggacctaaagtagtggattgggcatgttcgttgcgaaaaacgaagaaatggttccggtggaaaaaactcgtgctttatctgcacccgacacccgttttcggaatgggtgacgtgcggcaacgaaattgtgcgaaaccaccccaaacatgagttttggacctaaagtagtggattgggcattttcgttgggaaaaacgaagaaatggttccggtggcaaaaactcgtgctttgtatgcaccccgacacccattttcggaatgggtgacgtgcggcaacgaaattgcacgaaacctacccaaacatgagttttggacctaaagtagtggattgggcatgttcgttgcgaaaaacgaagaaatggttctgggggcaaaaactcgtgcttttatgcaacccgatacccgttttcagaatgggtgacgtgcgacatcaaaattgcgcgaaacctccccaaacatgagttttggacctaaagtagtggattaggcatgttcgttgtgaaaaacgaagaaatggttccggtggaaaaaaactcgtgctttgtatgcaccccgacacccgttttcagaatgggtgacgtgcggcaacgaaattgcgagttttggacctaaagtagtggattgggcatgttcgttgcgaacaacgaagaaatggttccggtggcaaaaactcgtgctttgtatgcaccccgacaaccattttcggaatgggtgacgtgcgacaacgaaattgcgcgaaatctccccaaacatgagttttggacctaaagtagtggaataggcatgttcgttgcgaaaaacgaagaaatggttccggtggcaaaaaa

SEQ ID NO: 599 - DNA, 5385 bp, Zea mays
  source: /note="Zea mays BAC clone full insert sequence contig bacm.pk128.j21.fis9"
cacgaagaggaaccttcggccatcttatacaaacagcttcagccgaagaccgcttcttcctataagaccttcggcgacgaagcatagacccaacaattagttttggacctaaactagtggattgggcatgttcgttgcgaaaaacgacgaaatggttccgctggcaaaaactcgtgctttgtatgcacccgacacccgttttcggaatgtgtgacgtgcgacaatgaaattgcgcgaaaccaccccaaacatgagttttggacctaaagtagtggattgggcatgttcattgcgaaaaacaaagaaatgattccggtggcaaaaactcgtgctttgtatgcaccccgacaacccgttttcggaatgtgtgacgtgcgataacgaaattgcgcgaaacaaccccaaacatgagttttggacctaaagtagtggtttgggcatgttcgttgcgaaaaacgaagaaatggttccggtggcaaaaactcgtgctttgtatgcaccccgacaacccgttttcggaatgtgtgacgtgcgacaacgaaattgcgcgaaaccacccccaaacatgagttttggacctaaagtagtggattgggcatgttcgttgcgaaaaacgaagaaatggttccggtggcaaaaactcgtgctttgtatgcacccgacacccgttttcggaaagggtgacgtgagacaacgaaattgcgcgaaaccaccccaaacatgagttttggacctaaagtagtggattgggcatgttcgttgcgaaaaacgaagaaatggttccggtggcaaaaactcgtgcttttatgcacctcgatacctgttttcagaatgggtgacgtgcgacaacgaaattgcgcgaaaccacctcaaactagagttttggacctaaagtagtggattgggcatgttcgttgcgaaaaacgaagaaatggttccgctggcaaaaactcgtgctttgtatgcaccccgacacccgttttcggaatgggtgacgtgcgacaatgaaattgcgcgaaaccaccccaaacatgagttttggacctaaagtagtggattgggcctgttcgttgcaaaaacgaagaaatggttccggtggcaaaaactcgtgctttgtatgcaccccgacaacccgttttcggaacgtgtgacgtgcgacaacgaaattgcgcgaaaccaccccaaacatgagttttggacctaaagtagtgggttgggcatgttcgttgcgaaaaacaaagaaatggttccggtggcaaaaactcgtgctttgtatgcacccgacactcgttttcggaatgggtgacgtgcgacaacaaaattgcgcgaaaccaccccaaacatgagttttggacctaaagtagtggattgggcatgttcgttgcgaaaaacgaagaaatggttctggtggcaaaaactcgtgcttttatgcacctcgatacctgttttcagaatgggtgacgtgcgacaacgaaattgcgcgaaaccacctcaaacatgagttttggacctaaagtagtggattgggcatgttcgttacgaaaacgaagaaatggttccgctggcaaaaactcgtgctttgtatgcaccccgacacccgttttcggaatgggtgacgtgcgataacgaaattacgcgaaacaaccccaaacatgagttttggacctaaagtagtggattgggcatgttcgttgcgaaaaacgaagaaatggttccggtggcaaaaactcgtgctttgtatgcaccccgataacccgttttcggaatgtgtgacgtgcgacaacgaaattgcgcgaaaccaccccaaacatgagttttggacctaaagtagtggattgggcatgttcgttgcgaaaaacgaagaaatggttccggtggcaaaaactcgtgctttgtatgcacccgacacccgtttttggaaagggtgacgtgcgataacgaaattgcgcgaaaccaccccaaacatgagttttggacctaaagtagtggattgggcatgttcgttgcgaaaaacgaagaaatggttccagtggcaaaaactcgtgcttttatgcacctcgatacccgttttcagaatgggtgacgtgcgacaacgaaattgcacgaaaccacctcaacattagttttggacctaaactagtggattgggcatgttcgttgcgaaaaacgacgaaatggttccgctggcaaaaactcgtgctttgtatgcacccgacacccgttttcggaatgtgtgacgtgcgacaacgaaattgcgtgaaaccaccccaaacatgagttttggacctaaagtagtggattgggcatgttcgttgcgaaaaacgaagaaatggttccggtggcaaaaactcgtgctttgtatgcaccccgacaaccgtttcggaatgtgtgacgtgcgataacggaattgcgcgaaacaaccccaaacataagttttggacctaaagtagtggtttgggcatgttcgttgcgaaaaacgaagaaatggttccggtggcaaaaactcgtgctttgtatgcaccccgacaacccgttttcggaatgtgtgacgtgcgacaacgaaattgcgcgaaaccaccccaaacatgagttttggacctaaagtagtggattgggcatgttcgttgcgaaaaacgaagaaatggttccggtggcaaaaactcgtgcttttatgcacctcgatacccgttttcagaatgggtgacgtgcgacaacgaaattgcgcgaaaccacctcaacattagttttggacctaaactagtggattgggcatgttcgttgcgaaaaacgacgaaatggttccgctggcaaaaactcgtgctttgtatgcacccgacacccgttttcggaatgtgtgacgtgcgacaacgaaattgcgtgaaaccaccccaaacatgagttttggacctaaactagtggattgggcatgttcgttgcgaaaaacgaagaaatggttccggtggcaaaaactcgtgctttgtatgcaccccgataacccgttttcggaatgtgtgacgtgcgacaacgaaattgcgcgaaacccccccaaacatgagttttggacctaaagtagtggattgggcatgttcgttgcgaaaaacgaagaaatggttccggtggcaaaaactcgtgctttgtatgcacccgacacccgttttcggaaagggtgacgtgcgaaacgaaattgcgcgaaaccaccccaaacatgagttttggacctaaagtagtggattgggcatgttcgttgcgaaaaacgaagaaatggttccggtggcaaaaactcgtgctttgtatgcaccccgacacccgttttcggaaagggtgacgtgcgacaacgaaattgcgcgaaaccaccccaaacatgagttttggacctaaagtagtggattgggcatgttcgttgcgaaaaacgaagaaatggttccggtggcaaaaactcgtgcttttatgcacctcgataccagttttcagaatggttgacgtgcgacaacgaaattgcgcgaaaccacctcaaacatgagttgtggacctaaagtagtggattgggcatgttcgttacgaaaaacgaagaaatggttccgctggcaaaaactcgtgctttgtatgcaccccgacacccgttttcggaatgtgtgacgtgcgacaacgaaattgcgcgaaaccacccccaaacatgagttttggacctaaagtagtggattgggcatgttcgttgcgaaaaacgaagaaatggttccggtggcaaaaactcgtgctttgtatgcacccgacacccgttttcggaaagggtgacgtgagacaacgaaattgcgcgaaaccaccccaaacatgagttttggacctaaagtagtggattgggcatgttcgttgcgaaaaacgaagaaatggttccggtggcaaaaactcgtgcttttatgcacctcgatacctgttttcagaatgggtgacgtgcgacaacgaaattgcgcgaaaccacctcaaactagagttttggacctaaagtagtggattgggcatgttcgttgcgaaaaacgaagaaatggttccgctggcaaaaactcgtgctttgtatgcaccccgacacccgttttcggaatgggtgacgtgcgacaacgaaattgcgcgaaaccaccccaaacatgagttttggacctaaagtagtggattgggcatgttcgttgcgaaaaacgacgaaatggttccggtggcaaaaactcgtgctttgtatgcacccgacacccgttttcggaatgccacgtgcgacaatgaaattgcgcgaaaccaccccaaacatgagttttggacctaaagtagtggattgggcctgttcattgcaaaaaacgaagaaatggttccggtggcaaaaactcgtgctttgtatgcacccgacacccgttttcggaaagggtgacgtgcgacaacgaaattgcgtgaaaccaccccaaacatgagttttggacctaaagtagtggattgggcatgttcgttgcgaaaaacgaagaaatggttccggtggcaaaaactcgtgctttgtatgcaccccgacaaccgttttcggaatgtgtgacgtgcgataacgaaattgcgcgaaacaaccccaaacataagttttggacctaaagtagtggtttgggcatgttcgttgcgaaaaacgaagaaatggttccggtggcaaaaactcgtgctttgtatgcaccccgacaacccgttttcggaatgtgtgacgtgcgacaacgaaattgcgcgaaaccaccccaaacatgagttttggacctaaagtagtggattgggcatgttcgttgcgaaaaacgaagaaatggttccggtggcaaaaactcgtgctttgtatgcacccgacacccgttttcggaaagggtgacgtgcgacaacgaaattgcgcgaaaccacctcaaacatgagttttggacctaaagtagtggattgggcatgttcgttgcgaaaaacgaagaaatggttccggtggcaaaaactcgtgctttgtatgcaccccgacacccgttttcggaatgggtgacgtgcgacaacgaaattgcgcgaaaccaccccaaacatgagttttggacctaaagtagtggattgggcatgttcgttgcgaaaaacgaagaaatggttccggtggcaaaaactcgtgcttttatgcacctcgatacctgttttcagaatggttgacgtgcgacaacgaaattgcgcgaaaccacctccaacatgagttttggacctaaagtagtggattgggcatgttcgttacgaaaaacgaagaaatggttccgctggcaaaaactcgtgctttgtatgcaccccgacacccgttttcagaatgggtgacgtgcgataacgaaattacgcgaaacaaccccaaacatg

SEQ ID NO: 600 - DNA, 6204 bp, Zea mays
  source: /note="Zea mays BAC clone full insert sequence contig bacm.pk128.j21.fis10"
cgtttttcgcaacgaacatgcccaatccactactttaggtcccaaactcatgtttggggtggtttcgcgcaatttcgttgtcgcacgtcaccctttccgaaaacgggtgtcgggtgcatacaaagcacgagtttttgccaccggaaccatttcttcgtttttcgcaacgaacatgcccaatccactactttaggtccaaaactcatgtttggggtggtttcgcgcaatttcgttgtcgcacgtcaccctttccgaaaatgggtgtcgggtgcatacaaagcacgagtttttgccaccggaaccatttcttcgtttttcgcaacgaacatgcccaatccagtactttaggtccaaaactcatgtttggggtggtttcgcgcaatttcgttgtcacacgtcacacattccgaaaacgggttgtcggggtgcatacaaagcacgagtttttgccaccggaaccatttcttcgtttttcgcaacgaacatgcccaaaccactactttaggtccaaaacttatgtttggggttgtttcgcgcaatttcgttatcgcacgtcacacattccgaaaacggttgtcggggtgcatacaaagcacgagtttttgccaccggaaccatttcttcgtttttcgcaacgaacatgcccaatccactactttaggtccaaaactcatgtttggggtggtttcacgcaatttcgttgtcgcacgtcacacattccgaaaacgggtgtcgggtgcatacaaagcacgagtttttgccagcgagaaccatttcgtcgtttttcgcaacgaacatgcccaatccactactttaggtccaaaactcatgtttgaggtggtttcgcgcaatttcgttgtcgcacgtcacccattctgaaaacaggtatcgaggtgcataaaagcacgagtttttgccaccggaaccatttcttcatttttcgcaacgaacatgctcaatccactactttaggtccaaaactcatgtttggggtggtttcgcgcaatttcgttgtcgcacgtcacgctttccgaaaacgggtgtcgggtgcatacaaagcacgagtttttgccaccggaaccatttcttcgtttttcgcaacgaacatgcccaatccactactttaggtccaaaactcatgtttggggtggtttcgcgcaatttcgttgtcgcacgtcacacattacgaaaacgggttatcggggtgcatacaaagcacgagtttttgacaccggaaccatttcttcgtttttcgcaacgaacatgcccaatccactactttaggtccaaaactcatgtttggggtggtttcacgcaatttcgttgtcgcacgtcacacattccgaaaacgggtgtcggggtgcatacaaagcacgagtttttgccagcggaaccatttcttcgtttttcgtaacgaacatgcccaatccactactttaggtccacaactcatgtttgaggtggtttcgcgcaatttcgttgtcgcacgtcaaccattctgaaaactggtatcgaggtgcataaaagcacgagtttttgccaccggaaccatttcttcgtttttcgcaacgaacatgcccaatccactactttaggtccaaaactcatgtttggggtggtttcgcgcaatttcgttgtcgcacgtcacccattccgaaaacgggtgtcggggtgcatacaaagcacgagtttttgccaccggaaccatttcttcgtttttcgcaacgaacatgcccaatccactactttaggtccaaaactcatgtttggggtggtttcgcgcaatttcgttgtcgcacgtcaccctttccgaaaacgggtgtcgggtgcatacaaagcacgagtttttgccaccggaaccatttcttcgtttttcgcaacgaacatgcccaatccactactttaggtccaaaactcatgtttggggtggtttcgcgcaatttcaatgccgcacgtcacacattccgaaaacgggttgtcggggtgcatacaaagcacgattttttgccaccagaaccatttcttcttttttcgcaacgaacatgcccaatccactactttaggtccaaaactcatgtttggggtggtttcgcgcaattttgttgtcgcacgtcacccattccgaaaacggttgtcggggtgcatacaaagcacgagtttttgccaccggaaccatttcgtcgtttttcgcaacgaacatgcccaatccactactttaggtccaaaactcatgtttggggtggtttcgcgcaatttcgttgtcgcacgtcacccattccgaaaacgggtgtcggggtgcatacaaagcacgagtttttgccagcggaaccatttcttcgtttttcgcaacgaacatgcccaatccactactttaggtccaaaactctagtttgaggtggtttcgcgcaatttcgttgtcgcacgtcacccattctgaaaacaggtatcgaggtgcataaaagcacgagtttttgccaccggaaccatttcttcgtttttcgcaacgaacatgcccaatccactactttaggtccaaaactcatgtttggggtggtttcgcgcaatttcgttgtctcacgtcaccctttccgaaaacgggtgtcgggtgcatacaaagcacgagtttttgccaccggaaccatttcttcgtttttcgcaacgaacatgcccaatccactactttaggtccaaaactcatgtttggggggggtttcgcgcaatttcgttgtcgcacgtcacacattccgaaaacgggtgtcggggtgcatacaaagcacgagtttttgccagcggaaccatttcttcttttttcgcaacgaacatgcccaatccactactttaggtccaaaactcatgtttggggtggtttcgcgcaatttcgttgtcgcacgtcacccattccgaaaacgggtgtcggggtgcatacaaagcacgagtttttgccagcggaaccatttcttcgtttttcgcaacgaacatgcccaatccactactttaggtccaaaactctagtttgaggtggtttcgcgcaatttcgttgtcgcacgtcacccattatgaaaacaggtatcgaggtgcataaaagcacgagtttttgccaccggaaccatttcttcgtttttcgcaacgaacatgcccaatccactactttaggtccaaaactcatgtttggggtggtttcgcgcaatttcgttgtctcacgtcaccctttccgaaaacgggtgtcgggtgcatacaaagcacgagtttttgccaccggaaccatttcttcgtttttcgcaacgaacatgcccaatccactactttaggtccaaaactcatgtttggggtggtttcgcgcaatttcgttgtcgcacgtcacacattctgaaaacgggttgtcggggtgcatacaaagcacgagtttttgccaccggaaccatttcttcgtttttcgcaacgaacatgcccaaaccactactttaggtccaaaactcatgtttggggtggtttcgcgcaatttcgttgtcgcacgtcgcacattccgaaaacgggttgtcggggtgcatacaaagcacgagtttttgccaccggaaccatttcttcgtttttcgcatcgaacatgcccaaaccactactttaggtccaaaacttatgtttggggttgtttcgcgcaatttcgttatcgcacgtcacacattccgaaaacggttctcggggtgcatacaaagcacgagtttttgccaccggaaccatttcttcgtttttcgcaacgaacatgcccaatccactactttaggtcgaaaactcatgtttggggtggtttcgcgcaatttcgttgtcgcacgtcacacattccgaaaacgggttgtcgggatgcataaaagcacgagtttttgccaccggaaccatttcttcgtttttcgcaacgaacattcccaaaccactactttaggtccaaaacttatgtttggggttgtttcgcgcaatttcgttatcgcacgtcacacattccgaaaacggttgtcgggtgcatacaaagcacgagtttttgccaccagaaccatttcttcgtttttcgcaacgaacatgcccaatccactactttaggtccaaaactcatgtttggggtggtttcgcgcaatttcgttgtcgcacgtcacacattccgaaaacgggttgtcggggtgcatacaaagcacgagtttttgccaccggaaccatttcttcgttttttgcaacgaacatgcccaatccactactttaggtccaaaactcatgtttggggtggtttcgcgcaatttcattgtcgcacgtcacccattccgaaaacgggtgtcgggtgcatacaaagcacgagtttttgccaccggaaccatttcgtcgtttttcgcaacgaacatgcccaatccaatactttaggtccaaaactcatgtttggggtggtttcgcgcaatttcgttgtcgcacgtcacccattccgaaaacgggtgtcggggtgcatacaaagcacgagtttttgccagcggaaccatttcttcgtttttcgcaacgaacatgcccaatccactactttaggtccaaaactctagtttgaggtggtttcgcgcaatttcgttgtcgcacgtcacccattctgaaaacaggtatcgaggtgcataaaagcacgagtttttgccaccggaaccatttcttcgtttttcgcaacgaacatgcccaatccactactttaggtccaaaactcatgtttggggtggtttcgcgcaatttcgttgtctcacgtcaccctttccgaaaacgggtgtcgggtgcatacaaaacacgagtttttgccaccggaaccatttcttcgtttttcgcaatgaacatgcccaatccactactttaggtccaaaactcatgtttggggtggtttcgcgcaatttcattgtcgcacgtcacacattccgaaaacgggtgtcgggtgcatacaaagcacgagtttttgccagcggaaccatttcgtcgattttcgcaacgaacatgcccaatccactagtttaggtccaaaactaattttgaggtggtttcgcgcaatttcgttgtcgcacgtcacccattctgaaaacgggtatcgaggtgcataaaagcacgagtttttgccaccggaacgattccttcgtttttcgcaacgaacatgccgactttaggtccaaaactcatgtttggggtggtttcgcgcaatttcgttgtcgcacgtcaccctttccgaaaatgggtgtcgggtgcatagaaagcacgagtttttgccaccggaaccatttcttcgtttttcgcaacgaacatgcccaatccactactttaggtccaaaactctagtttgaggtggtttcgcgcaatttcgttgtcgcacgtcacccattctgaaaacaggtatcgaggtgcataaaagcacgagtttttgccacaggaaccatttcttcgtttttcgcaacgaacatgcccaatccactactttaggtccaaaactcatgtttggggtggtttcgcgcaatttcgttgtctcacgtcaccctttccgaaaacgggtgtcgggtgcatacaaagcacgagtttttgccaccggaaccatttcttcgtttttcgcaacgaacatgcccaatccactactttaggtccaaaactcatgtttgggggtggtttcgcgcaatttcgttgtcgcacgtcacacattccgaaaacgggttgtcggggtgcatacaaagcacgagtttttgccaccggaaccatttcttcgtttttcgcaacgaacatgcccaaaccactactttaggtccaaaactcatgtttggggttgtttcgcgcaatttcgttatcgcacgtcacagattccgaaaacgggttgtcggggtgcatacaaagcacgagtttttgccaccggaaccatttcttcgtttttcgcaacgaacatgcccaatccactactttagttccaaaactcatgtttggggtggtttcgcgcaatttcattgtcgcacgtcacacattccgaaaacgggtgtcgcgtgcatacaaagcacgagtttttgccagcggaaccatttcgtcgtttttcgcaacgaacatgcccaatccactagtttaggtccaaaactaattgttgggtctatgcttcgtcgccgaaggtcttataggaagaagcggtcttcggctgaagctgtttgtataagatggccgaaggttcct

SEQ ID NO: 601 - DNA, 3464 bp, Zea mays
  source: /note="Zea mays BAC clone full insert sequence contig bacm.pk128.j21.fis11"
tggaaatagtcctcaacagattgagaaccttgctgaaaacgctgcattttattaagcaaatcacgagcataatacgaaggcacaaatcgatgtcgcatcgcagctttcaactgatcccaagtggttggaatggtagtgggatgttttattttaaactcacgccaccaaattaaagcaaaatcagtaaattcactaatagcagctttaacctgagaatgtgcagcaatatcatggcatgaaaatttttgttcaacctctaactcccaatcaagatatgcagcaggatcatatttgccattaaaaggtggaattttaaatttaatcttagaaaataagtcattagggggattacgaaccacacggcgtgcacgaccacggcgatctccatcgtcccactcagtgtcaccgccgtagtcctgctccatctttgtggtcaacgcatcaaggcgtgctaggatggtgtcgagtgtggtgcgagtcgccgtttgagcaaggtcaagctggttgaaacgctcggtcgtcgaagtgaccgttgaatcaagccgttcatgcatcgtcctaatgtcatcagcaagtccatcaacttgtccctttacttccagcaactgggcatccaccgtgtcatgtgctcctgccatagttagcgcaaacaccaaaacaccaaaaaaaacgacaaaaacaggggtgtactgctcacaaggcgctcacactagtgctgttatcaaattcttatccgttcttaccaagccacagtggtgaactgcaaccaacaggtggaaccggtgaaagattggatgagcgattgcctggagaaacagaaacctactcgttgtagaaatatgtggagttctgggtaggctgcactcaagtcaaggattagcacgaccaaacaataatgcaaagttgaattatagtgcaaaacacgaaactatattgctggccacaagtgcaaaggacggatggaactagcagaatggcagtaccgtaaatattgtactagcgaggccactagtaggaatcacaagtgattttgtttttcttttttgtatgatttttttggtatttttctcagcacaagaagcaacaaaataggagctacacgaagtttcacctaaaacagagttcaaatgtggtctacagaaaatcagaaagttctctaaaaagcgtgcgagaactttgaaggattttttctttattttcctgaattttttttgacaattttgtcgaacccaaacagaccgaaggtcagtttggccggcctcagaatggtgtcaactagctcctgtaaaaatttcagatttttcggacacccgagcgaaaagttatgcccggtttaaggaaggtacctcaagttatgttttcaaacgaccgggatgaaacaaccgtatcctttctccttcgttgttttttttgtttctgttttttttgacgtaaccgaaggagaaaaacaaggaaacgatgttgactcggttttttttttctgtttttttttcgtaaccgaaggagaaaaacaaggaaacggccgttgactcggtttgttttttctgttttttttttgacgtaaccgaaggagaaaaacaaggaaacaatgttgactcggtttgtggcgtgatcaaagaggagatggtggcggcgctaggatttgaatggtggaagaacacaatgcaaccagcaacaaatgacgcgaaagcacacaaattcaacaatgcagattattgaaagaaagtgcgaggctcaaaagggtgctcggataaggtctaacctgaatttttatgtggttttgtggactgtaggaaaaaaaaactcgataaactcaccgatcaacctggaaatctgataccaattgatgaagctgaggtgcccgatctttcggcgagtagagataattccgatttggcggaagatgacccttgcgatccgactacgacgagcaagcccgaggcgccaatgcaatcgctgaaccaactccctgtggttaccgaccttgctgatgcgagatcggcctgatcacgaagatcgtttcctgtgcgcaatcgaagaacgaacaagaacaagatgcgagcaatctaatctattactcgaaggtggagttctgaatacacgaagacagcgcagatttgcgcgtgttcgagagtagctaaggctaacgtaaaacaaaactcggaaaataaaggaggcgcagctcctgtataaatagagagggggcgcagccctaggggcggccaaccctaggtcgtccataatgggccgcaattgggctggtcgtctattcttctgggccttcgttctttaacaacatgatgtagttcaattctcttgcacgggcccgagtcactggcccaggtggaaggggtggcgcctggactggggaagatggtgcctgggctggagaaggtgctgctggtgtagatgtgctcgtgttggtgttgatgtcctcatcacatcacaatcaacaaaatcagaataagcacccatggagaaaggaactcgcacggaacgcgtgatttttattttaccaccatcattaagccattgaatgtgatatgggtttggatgcttacgagtgggtaacgacaacttttcgaccagcatggtactcgccaaattgttgcaactgccgctgtcgataatgatgcgaattgaccgctcctgcacaacaccctttgtatggaacagagtgtgtcgctgattcttctcgggcaaagcgacctgtgtactaagaacacgctgcacaacaagactttcatacctatcagcgtcgcccgggttgacatgtacctccgccttagctgcatggtcagtggcaagtagtgcatgttcaatttcttcagaatcactagcggaagagtactcaccatcgtcacgaatgagtaaagtgcgcttgtttgggcagtcccgaatcacatggccaaatcctctacagcgatgacactgaatatcccgtgtacgacctgtgggtgcggcagtgctggctggtttggtcgtcttctcgcgtggagtagtggtggacgtggatggcgcagggggaactggtgctgaggtggatgtcgagcttcgtcctgcaaaagggttagaatatggcttcgagcggcgtccctgcacttcacgttcagctttgcaagcatattcaaataaagtagtcatatcataatattccttataatcaagtatatcttggatttcgcggtttaaaccaccacgaaaacgtgccatagcagcgtcgttgtcctccaatatcccacaacgaatcatacctttttgtaactcctggaaatagtcctcaacagattgagaaccttgctgaaaacgctgcattttattaagcaaatcacgagcataatacgaaggcacaaatcgatgtcgcatcgcagctttcaactgatcccaagtggttggaatggtagtgggatgttttattttaaactcacgccaccaaattaaagcaaaatcagtaaattcactaa

SEQ ID NO: 602 - DNA, 9006 bp, Zea mays
  source: /note="Zea mays BAC clone full insert sequence contig bacm.pk128.j21.fis12"
aaattgcgcgaaacaaccccaaacataagttttggacctaaagtagtggtttgggaatgttcgttgcgaaaaacgaagaaatggttccggtggcaaaaactcgtgcttttatgcatcccgacaacccgttttcggaatgtgtgacgtgcgacaacgaaattgcgcgaaaccaccccaaacatgagttttcgacctaaagtagtggattgggcatgttcgttgcgaaaaacgaagaaatggttccggtggcaaaaactcgtgctttgtatgcacccgacacccgttttcggaaagggtgacgtgcgacaacgaaattgcgcgaaaccaccccaaacatgagttttggacctaaagtagtggattgggcatgtttgttgctgatgtagctgaggtgcccgatctttcggcgagtagagataattccgatttggcggaagatgacccttgcgatccgactacgacgagcaagcccgaggcgccaatgcaatcgctgaaccaactccctgtggttaccgaccttgctgatgcgagatcggcctgatcacgaagatcgtttcctgtgcgcaatcgaagaacgaacaagaacaagatgcgagcaatctaatctattactcgagggtggagttctgaatacacgaggacagcgcagatttgcgcgtgttcggaagtagctaaggctaacgtaaaacaaaactccccaaaaataaaggaggcgcagctcctgtataaatagagagggggcgcagcccctaggggcggccaaccctaggtcgtccattatgggccgcaattgggctggtcgtctatccttccgggccttcgttctttaacaacatgatgtagttcaattctcttgcacgggcccgagtcactggcccaggtggaaggggtggcgcctgggctggagaaggtgctgctggtgtagatgtgctcgtgttggtgttgatgtcctcatcatcctccccttcttgaactgaagtcgtcctcgacggcaactcctcatcttctcccgcatacggtttcaaatctgcaacattaaaactagtggaaacaccaaactccgcaggcaggtcaaggatataagcattatcattaatcttggttagtaccttaaaaggaccagcagcacgaggcatcaatttagaacggcgcaaagtaggaaaacgatcctttctcaaatgcaaccaaaccatatcaccaggttcaaaagtaactagtttccggcctttactaccagtaatctgatatttagcattagcagcagcaatgttttgttgagtttgttcatggagattaatcatttgttcaacatgtgcaagagcatctatgtgtggggcgtccgtagcatcaagcgaaaacaaagcaataggcgccctaggaatgtaaccataaacaatttgaaaagggcacatctttgtagaagaatgtgttgcatgattataagcaaactcaacatgaggtaagcaatcctcccaacgtttcaaatttttgtctaaaacagccctaagcatggtagacaaagttcgattaactacctcagtttgaccatcagtctgagggtgacaagtggtgctaaacagcaatttagttcctaatttattccacagagatctccaaaaatgactcagaaacttggcatcacgatccgagactattgtattgggaataccgtgcaaacgaataatctctctaaaaaacaattcagcaacattgctagcatcatcagtcttatgacaaggtatgaaatgagccattttggagaatcgatcaacaaccacaaaaatgctatccctccccttcttagttctaggcaatcccaaaacaaaatccatcgaaatatcaatccaagggaaagtaggaacaggcaaaggcatatacaaaccatggttgttcaaccgtgacttagctttctgacaagtagtgcagcgtgcaacaaggcgctcaacatcagcgcgcatccgaggccaaaagaagtgggcagccaacacctcatgtgtcttgtagacgccaaagtgccccatgagaccgcctccatgtgcttcctgtaacaacaaaagacgaaccgagctagctggaacacacagcttgttagcgcgaaacaggaacccatcctgtatgtgaaatttgccccatggtttcccattaatacaatggccgaaagcatctttaaaatcagcatcgtcaacatattgatcttttacagtgtgcaaaccaaagattttaaaatctaactgtgacagcatggtatagcgacgagacaaagcatcagcaataacattgtccttcccgttcttgtgtttaataatgtaaggaaaagactcaatgaattctacccatttagcatgacgacggttcagatttgtttgggtacgaatatgttttaaagcctcatgatcagaatgaattatgaactcacgatgccaaagatagtgctgccatgtatgtaaagtgcgcactaacgcgtaaagctccttatcataagtagaatatttcagactagcaccgcttaatttttcactaaaataagcaactggttttccttcttgtaataaaacagcacctagcccaataccgctagcatcgcattcaagctcaaatactttattaaaatcaggcaattgcaataggggagcttgggttaacttatctttcaaagtgctgaacgcttcctcctgcgaatcactccaagcaaatggcacatctttctttgtaagctcatgtagaggcgctgcaatggagctaaaatcacgaacaaatctgcggtagaaaccggcaagtccaagaaagctccgaatttgtgtgaccgtcgtcggtgtaggccactcccgaatggcagcaatcttgctgctatccacctcaatgccctgtggagtaacaacataaccaagaaacgagacacgtcgtgtgcaaaagatgcatttttccatgttagcgaataactgggcggcacgcaatgcatcaaaaacagcacttaaatgttccaaatgctctttcttagatttgctgtaaataaggatatcatcgaaataaacaaccacaaacaatcctatgaagggcctcagaacttcattcatcactcgcataaaagtgctgggagcattagtcaatccaaacggcataaccaaccattcatataaaccaaatttcgttttgaaggctgttttccattcatcacctagtttcattctaatctggtggtaaccactacgcaaatcaatcttagtgaaaataatggcaccactaagctcatctagcatatcatcaaggcgtggtataggatagcgataacgaatagtgatattattaatagcacgacagtctacacacatacgccatgacccatccttcttgggaacaagtaacacaggaacagagcaagggctaagagactcacgaatgtatcctttgtcaagcaacgcctttacctggcgctgaatctccttcgtctcatccggatttgtacggtatggtgcgcggtttggaagctgtgcaccgggaatgaggtcgatctggtgctcaatgccacgaagcggtgggagacccggtggtaagtctttgggaaagacatcagcgtactcctgcaaaaggttagcaaccatagggggaatagccaaagatggtgcatcatcaagtgaaatgaggacactagagcatacaagtgcatagcatggcaaatgagcaccgtgtagatcatcaaaatcagcacgtgtagcaagtaaaacaggagccttcaacttaatttcagaaggaacagagtgcgatggatcaagttgtttagcagttatagcagctcgggcaagatcatctttaacaatttgttcaggtgtcattggatgtataattattttctgacccttaaaaatgaaagaataatgattcgaacgaccatgatgcaagctatcagtatcatattgccaaggtcgaccaagtaacaaagagcatgcttccatgggaataacatcacaatcaacaaaatcagaataagcacccatggagaaaggaactcgcacggaacgcgtgatttttattttaccaccatcattaagccattgaatgtgatatgggttcggatgcttacgagtgggtaacgacaacttttcgaccagcatggtactcgccaaattgttgcaactgccgctgtcgataatgatgcgaattgaccgctcctgcacaacaccctttgtatggaacagagtgtgtcgctgattcttctcgggcaaagcgacctgtgtactgagaacacgctgcacaacaagactttcatacctatcagcgtcgcccgggttgacatgtacctccgccttagctgcatggtcagtggcaagtagtgcatgttcaatttcttcagaatcactagcggaagagtactcaccatcgtcacgaatgagtaaagtgcgcttgtttggacagtcccgaatcacatggccaaatcctctacagcgatgacactgaatatcccgtgtacgacctgtgggtggggcagtgctggctggtttggtcgtcttctcgcgtggagtagtggtggacgtggatggcgcagggggaactggtgctgaggtggatgtcgagcttcgtcctgcaaaagggttagaatattgcttcgagcggcgtccctgcacttcacgttcagctttgcaagcatattcaaataaagtagtcatatcataatattccttataatcaagtatatcttggatttcgcggtttaaaccaccacgaaaacgtgccatagcagcgtcgttgtcctccaatatcccacaacgaatcatacctttttgtaactcctggaaatagtcctcaacagattgagaaccttgctgaaaacgctgcattttattaagcaaatcacgagcataatacgaaggcacaaatcgatgtcgcatcgcagctttcaactgatcccaagtggttggaatggtagtgggatgttttattttaaactcacgccaccaaattaaagcaaaatcagtaaattcactaatagcagctttaacctgagaatgtgcagcaatatcatggcatgaaaatttttgttcaacctctaactcccaatcaagatatgcagcaggatcatatttgccattaaaaggtggaattttaaatttaatcttagaaaataagtcattagggggatgacgaaccacacggcgtgcacgaccacggcgatctccatcgtcccactcagtgtcaccgccgtagtcctgctccatctttgtggtcaacgcatcaaggcgtgccaggatggagtcgagtgtggtgcgagtcgccgtttgagcaaggtcaagctggttgaaacgctcggtcgtcgaagtgaccgttgaatcaagccgttcatgcatcgtcctaatgtcatcagcaagtccatcaacttgtccctttacttccagcaactgggcatccaccgtgtcatgtgctcctgccatagttagcgcaaacaccaaaacaccaaaaaaaacgacaaaaacaggggtgtactgctcacaaggcgctcacactagtgctgttatcaaattcttatccgttcttaccaagccacagtggtgaactgcaaccaacaggtggaaccggtgaaagattggatgagcgattgcctggagaaacagaaacctactcgtcgtagaaatatgtggagttctgggtaggctgcactcaagtcaaggattagcacgaccaaacaataatgcaaagttgaattatagtgcaaaacacgaaactatattgctggccacaagtgcaaaggacggatggaactagcagaatggcagtaccgtaaatattgtactagcgaggccactagtaggaatcacaagtgattttgtttttcttttttgtatgatttttttgatatttttctcagcacaagaagcaacaaaataggagctacacgaagtttcacctaaaacagagttcaaatgtggtctacagaaaatcaggaagttctctgaaaagcgtgcgagaactttgacggatttttttctttattttcctgaatttttttgacaattttgtcgaacccaaacagaccgaaggtgagtttggccggcctcagaatggtgtcaactagctcctgtaaaaatttcagatttttcggacacccgagcgaaaagttatgcccggtttaaggaaggtacctcaagttatgttttcaaacgaccgggatgaaacaaccgtatcctttctccttcgttgtttttttttgtttctgttttttttttgacgtaaccgaaggagaaaaacaaggaaacgatgttgcctcggtttttttttttctgttttttttcgtaaccgaaggagaaaaacaaggaaacggccgttgactcggtttgttttttctgtttttttttacgtaaccgaaggagaaaaacaaggaaacaatgttgactcggtttgtggcgtgatcaaaggggagatggtggcggcgctaggatatgaatggtggaagaacacaatgcaaccagcaacaaggaaacgcgaaagcacacaaattcaacaatgcagattattgaaagaaagtgcgaggctcaaaagggtgctgggataagaactaacctgaatttttatgtggttttgtggactgtaggaaaaaaaacgctcgataaactcaccgatcaacctggaaatctgataccaattgatgtagctgaggtgcccgatctttcggcgagtagagataattccgatttggcggaagatgacccttgcgatccgactacgacgagcaagcccgaggtgccaatgcaatcgctgaaccaactccctgtggttaccgaccttgctgatgcgagatcggcctgatcacgaagatcgtttcctgtgcgcaatcgaagaacgaacaagaacaagatgcgagcaatctaatctattactcgagggtggagttctgaatacacgaggacagcgcagatttgcgcgtgttcggaagtagctaaggctaacgtaaaacaaaactcccaaaaataaaggaggcgcagctcctgtataaatagagagggggcgcagcccctaggggcggccaaccctaggtcgtccattatgggccgcaattgggctggtcgtctatccttccgggccttcgttctttaacaacatgatgtagttcaattctcttgcacgggcccgagtcactggcccaggtggaaggggtggcgcctgggctggagaaggtgctgctggtgtagatgtgctcgtgttggtgttgatgtcctcatcacatgtttggggtggtttcgcgcaatttcgttgtcgcacgtcacacattccgaaaacggttgtcggggtgcatacaaagcacgagtttttgacaccggaaccatttcttcgtttttcgcaacgaacatgcccaatccactacttgaggtccaaaactcatgtttggggtggtttcgcgcaatttcgttgtcgcacgtcacacattccgaaaacgggtgtcgggtgcatacaaagcacgagtttttgccagcggaaccatttcgtcgtttttcgcaacgaacatgcccaatccactggtttaggtccaaaactcatgtttggggtggtttcgcgcaatttcgttgtcgcacgtcacacattccgaaaacgggtgtcgggtgcatacaaagcacgagtttttgccagcggaaccatttcgtcgtttttcacaacgaacatgcccaatccactagtttaggtccaaaactaatgttgaggtggtttcgcggaatttcgttgtcgcacgtcacccattctgaaaacgggtatcgaggtgcataaaagcacgagtttttgccaccggaaccatttcttcgtttttcgcaacgaacatgcccaatccactactttaggtccaaaactcatgtttggggtggtttcgtgcaatttcgttgtcgcacgtcacacattccgaaaacgggttgtcggggtgcatacaaagcacgagtttttgccaccggaaccattgcttcgtttttcgcatcgaacatgcccaaacaactactttaggtccaaaacttatgtttggggttgtttcgcgcaatttcgttatcgcacgtcacacattccgaaaacggttgtcggggtgcatacaaagcacgagtttttgccaccggaaccatttcttcgtttttcgcaacgaacatgcccaatccactactttaggtccaaaactcatgtttggggtggtttcgcgcaatttcgttgtcgcacgtcaccctttccgaaaacgggtgtcgggtgcatacaaagcacgagtttttgccaccggaaccatttcttcgtttttcgcaacgaacatgcccaatccactactttaggtccaaaactcatgtttggggtggtttcgcgcaatttcgttgtcgcacgtcaccctttccgaaaacgggtgtcgggtgcatacaaagcacgagtttttgccaccggaaccatttcttcgtttttcgcaacgaacatgcccaatccactactttaggtccaaaactcatgtttggggtggtttcgcgcaatttcgttgtcgcacgtcacacattccgaaaacgggttgtcggggtgcatacaaagcacgagtttttgccaccggaaccatttcttcgtttttcgcaacgaacatgcccaaaccactactttaggtccaaaacttatgtttggggttgtttcgcgtaattccgttatcgcacgtcacacattccgaaaacggttgtcggggtgcatacaaagcacgagtttttgccaccggaaccatttcttcgtttttcgcaacgaacatgcccaatccactactttaggtccaaaactcatgtttggggtggtttcacgcaatttcgttgtcgcacgtcacacattccgaaaacgggtgtcggggtgcatacaaagcacgagtttttgccagcggaaccatttcttcgtttttcataacgaacatgcccaatccactactttaggtccacaactcatgtttgaggtggtttcgcgcaatttcgttgtcgcacgtcaaccattctgaaaactggtatcgaggtgcataaaagcacgagt

SEQ ID NO: 603 - DNA, 15483 bp, Zea mays
  source: /note="Zea mays BAC clone full insert sequence contig bacm.pk128.j21.fis13"
ttacgctagatgaaatggttccggtggcaaaaactcgtgcttttatgcacctcgataccagttttcagaatggttgacgtgcgacaacgaaattgcgcgaaaccacctcaaacatgagttgtggacctaaagtagtggattgggcatgttcgttacgaaaaacgaagaaatggttccgctggcaaaaactcgtgctttgtatgcaccccgacacccgttttcggaatgtgtgacgtgcgacaacgaaattgcgcgaaaccacccccaaacatgagttttggacctaaagtagtggattgggcatgttcgttgcaaaaaacaaaaaaatggttccggtggcaaaaactcgtgctttgtatgcacccgacacccgttttcggaaagggtgacgtgagacaacgaaattgcgcgaaaccaccccaaacatgagttttggacctaaaataggggattgggcattttcgttgccaaaaacgaagaaatggttccgggggcaaaaacttgtgcttttatgcaccccgacacccgttttcggaatgggtgacgtgcgacaacgaaattgcgcgaaaccaccccaaacatgagttttggacctaaagtagtggattgggcatgttcgttgcgaaaaacgacgaaatggttccggtggcaaaaactcgtgctttgtatgcacccgacacccattttcggaatgggtgacgtgcgacaatgaaattgcgcgaaaccaccccaaacatgagttttggacctaaagtagtggattgggcctgttcattgcaaaaaacgaagaaatggttccggtggcaaaaactcgtgctttgtatgcaccccgacaacccgttttcggaacgtgtgacgtgcgacaacgaaattgcgcgaaaccaccccaaacatgagttttggacctaaagtagtggattgggcatgttcgttgcgaaaaacaaagaaatggttccggtggcaaaaactcgtgctttgtatgcacccgacacccgttttcggaatgggtgacgtgcgacaacgaaattgcgcgaaaccaccccaaacatgagttttggacctaaagtagtggattgggcatgttcgttgcgaaaaacgaagaaatggttccggtggcaaaaactcgtgcttttatgcacctcgatacctgttttcagaatgggtgacgtgcgacaacgaaattgcgcgaaaccatctcaaacatgagttttggacctaaagtagtggattgggcatgttcgttacgaaaacgaagaaatggttccgctggcaaaaactcgtgctttgtatgcaccccgacacccgttttcggaatgggtgacgtgcgataacgaaattacgcgaaacaaccccaaacatgagttttggacctaaagtagtggattgggcatgttcgttgcgaaaaacgaagaaatggttccggtggcaaaaactcgtgctttgtatgcaccccgataacccgttttcggaatgtgtgacgtgcggcaacgaaattgcgcgaaaccaccccaaacatgagttttggacctaaagtagtggattgggcatgttcgttgcgaaaaacgaagaaatggttccggtggcaaaaactcgtgctttgtatgcacccgacacccgttttcggaaagggtgacgtgcgataacgaaattgcgcgaaaccaccccaaacatgagttttggacctaaagtagtggattgggcatgttcgttgcgaaaaacgaagaaatggttccggtggcaaaaactcgtgcttttatgcacctcgatacccgttttcagaatgggtgacgtgcgacaacgaaattgcgcgaaaccacctcaacattagttttggacctaaactagtggattgggcatgttcgttgcgaaaaacgacgaaatggttccgctggcaaaaactcgtgctttgtatgcacccgacacccgttttcggaatgtgtgacgtgcgacaacgaaattgcgtgaaaccaccccaaacatgagttttggacctaaagtagtggattgggcatgttcgttgcgaaaaacgaagaaatggttccggtggcaaaaactcgtgctttgtatgcaccccgacaaccgttttcggaatgtgtgacgtgcgacaacgaaattgcgcgaaacaaccccaaacataagttttggacctaaagtagtggtttgggcattttcgttgggaaaaacgaagaaatggttccggtggcaaaaactcgtgctttgtatgcaccccgacaacccattttcggaatgggtgacatgcggcaacgaaattgcacgaaacctccccaaacatgagttttggacctaaagtagtggattgggcatgttcgttgcgaaaaacgaagaaatggttccggtggcaaaaactcgtgctttgtatgcacccgacacccgttttcggaaagggtgacgtgcgacaacgaaattgcgcgaaaccaccccaaacatgagttttggacctaaagtagtggattgggcatgttcgttgcgaaaaacgaagaaatggttccgctggcaaaaactcgtgctttgtatgcaccccgacacccgttttcggaatgggtgacgtgcgacaacgaaattgcgcgaaaccaccccaaacatgagttttggacctaaagtagtggattgggcatgttcgttgcgaaaaacgacgaaatggttccggtggcaaaaactcgtgctttgtatgcaccccgacaacccgttttcggaatgtgtgacgtgcgataacgaaattgcgcgaaacaaccccaaacatgagttttggacctaaagtagtggtttgggcatgttcgttgcgaaaaacgaagaaatggttccggtggcaaaaactcgtgctttgtatgcaccccgagaaccgttttcggaatgtgtgacgtgcgataacgaaattgcgcgaaacaaccccaaacataagttttggacctaaagtagtggtttgggcatgttcgatgcgaaaaacgaagaaatggttccggtggcaaaaactcgtgctttgtatgcaccccgacaacccgttttcggaatgtgtgacgtgcgacaacgaaattgcgcgaaaccaccccaaacatgagttttggacctaaagtagtggattgggcatgttcgttgcgaaaaacgaagaaatggttccggtggcaaaaactcgtgcttttatgcacctcgatacccgttttcagaatgggtgacgtgcgacaacgaaattgcgcgaaaccacctcaacattagttttggacctaaactagtggattgggcatgttcgttgcgaaaaacgacgaaatggttccgctggcaaaaactcgtgctttgtatgcacccgacacccgttttcggaaagggtgacgtgcgacaacgaaattgcgcgaaaccaccccaaacatgagttttggacctaaagtagtggattgggcatgttcgttgcgaaaaacgaagaaatggttccagtggcaaaaactcgtgcttttatgcacctcgatacctgttttcagaatggttgacgtgcgataacgaaattacgcgaaacaaccccaacattagttttggacctaaagtagtggattgggcatgttcgttgcgaaaaacgaagaaatggttccgctggcaaaaactcgtgctttgtatgcaccccgacactcgttttcggaatgggtgacgtgcgataacgaaattacgcgaaacaaccccaaacatgagttttggacctaaagtagtggattgggcatgttcgttgcgaaaaacgaagaaatggttccggtggcaaaaactcgtgctttgtatgcaccccgacaacccattttcgtaatgtgtgacgtgcgacaacgaaattgcgcgaaaccaccccaaacatgagttttggacctaaagtagtggattgggcatgttcgttgcgaaaaacgaagaaatggttccggtggcaaaaactcgtgctttgtatgcacccgacacccgttttcggaaagggtgacgtgagacaacgaaattgcgcgaaaccaccccaaacatgagttttggacctaaagtagtggattgggcatgttcgttgcgaaaaaccaagaaatggttccggtggcaaaaactcgtgcttttatgcacctcgatacctgttttcagaatgggtgacgtgcgacaacgaaattgcgcgaaaccacctcaaactagagttttggacctaaagtagtggattgggcatgttcgttgcgaaaaacgaagaaatggttccgctggcaaaaactcgtgctttgtatgcaccccgacacccgttttcggaatgggtgacgtgcgacaacgaaattgcgcgaaaccaccccaaacatgagttttggacctaaagtagtggattgggcatgttcgttgcgaaaaacgacgaaatggttccggtggcaaaaactcgtgctttgtatgcaccccgacaacccgttttcggaatgtgtgacgtgcgataacgaaattgcgcgaaacaaccccaaacatgagttttggacctaaagtagtggtttgggcatgttcgttgcgaaaaacgaagaaatggttccggtggcaaaaactcgtgctttgtatgcaccccgagaaccgttttcggaatgtgtgacgtgcgataacgaaattgcgcgaaacaaccccaaacataagttttggacctaaagtagtggattgggcatgttcgttgcgaaaaacgacgaaatggttccggtggcaaaaactcgtgctttgtatgcacccgacacccgttttcggaatgggtgacgtgcgacaatgaaattgcgcgaaaccaccccaaacatgagttttggacctaaagtagtggattgggcctgttcattgcaaaaaacgaagaaatggttccggtggcaaaaactcgtgctttgtatgcaccccgacaacccgttttcggaacgtgtgacgtgcgacaacgaaattgcgcgaaaccaccccaaacatgagttttggacctaaagtagtggattgggcatgttcgttgcgaaaaacaaagaaatggttccggtggcaaaaactcgtgctttgtatgcacccgacacccgttttcggaatgggtgacgtgcgacaacgaaattgcgcgaaaccaccccaaacatgagttttggacctaaagtagtggattgggcatgttcgttgcgaaaaacgaagaaatggttccggtggcaaaaactcgtgctttgtatgcacccgacacccgttttcggaatgggtgacgtgcgacaacgaaattgcgcgaaaccaccccaaacatgagttttggacctaaagtagtggattgggcatgttcgttgcgaaaaacgaagaaatggttccgctggcaaaaactcgtgcttttatgcacctcgatacctgttttcagaatgggtgacgtgcgacaacgaaattgcgcgcaaccacctcaaacttgagttttggatctaaagtagtggattgggcatgttcgttgcgaaaaacgaagaaatggttccgctggcaaaaactcgtgctttgtatgcaccccgacacccgttttcggaatgggtgacgtgcgacaacgaaattgcgcgaaaccaccccaaacatgagttttggatctaaagtagtggattgggcatgttcgttgcgaaaaacgacgaaatggttccggtggcaaaaactcgtgctttgtatgcacccgacacccgtttttggaatgggtgacgtgcgacaatgaaattgcgcgaaaccaccccaaacatgagttttggacctaaagtaatagattgggcatgttcgttgcaaaaaacgaagaaatggttccggtggcaaaaactcgtgctttgtatgcaccccgacaacccgttttcagaatgtgtgacgtgcgacaacgaaattgcgcgaaaccaccccaaacatgagatttggacctaaagtagtggattgggcatgtttgttgcgaaaaacgaagaaatggttccggtggcaaaaactcgtgctttgtatgcacccgacacccgttttcggaatgggtgacgtgcgacaacgaaattgcgcgaaaccaccccaaacatgagttttggacctaaagtagtggactgggcatgttcgttgcgaaaaacgaagaaatggttccgctggcaaaaactcgtgcttttatgcacctcgatacctgttttcagaatggttgacgtgcgataacgaaattacgcgaaacaaccccaaacatgagttttggacctaaagtagtggattgggcatgttcgttgcgaaaaacgaagaaatggttccggtggcaaaaactcgtgctttgtatgcaccccgacaacccgttttcggaatgtgtgacgtgcgataacgaaattgcgcgaaacaaccccaaacataagttttggacctaaagtagtggtttgggcatgttcgatgcgaaaaacgaagaaatggttccggtggcaaaaactcgtgctttgtatgcaccccgacaacccgttttcggaatgggtgacgtgcggcaacgaaattgcacgaaacctacccaaacatgagttttggacctaaagtagtggattgggcatgttcgttgcgaaaaacgaagaaatggttccggtggcaaaaactcgtgcttttatgcacctcgatacccgttttcagaatgggtgacgtgcgacaacgaaattgcgcgaaaccacctcaacattagttttggacctaaactagtggattgggcatgttcgttgcgaaaaacgacgaaatggttccgctggcaaaaactcgtgctttgtatgcacccgacacccgttttcggaatgtgtgacgtgcgacaacgaaattgcgcgaaaccaccccaaacatgagttttggacctaaagtagtggattgggcatgttcgttgcgaaaaacgaagaaatggttccggtggcaaaaactcgtgcttttatgcacctcgatacctgttttctgaatggttgacgtgcgacaacgaaattgcgcgaaaccacctcaaacatgagttttggacctaaagtagtggattgggcatgttcgttacgaaaaacgaagaaatggttccgctggcaaaaactcgtgctttgtatgcaccccgacacccgttttcggaatgtgtgacgtgcgacaacgaaattgcgcgaaaccacccccaaacatgagttttggacctaaagtagtggattgggcatgttcgttgcgaaaaacaaagaaatggttccggtggcaaaaactcgtgctttgtatgcacccgacaaccgttttctgaaagggtgacgtgagacaacgaaattgcgcgaaaccaccccaaacatgagttttggacctaaagtagtggattgggcatgttccttgccaaaaacgaagaaatggttccggtggcaaaaactcctgcttttatgcacctcgacacctgttttcagaataggtgacgtgcgacaacgaaattgcgcgaaacaaccccaaacatgagttttggacctaaagtagtggattgggcatgttcgttgcgaaaaacgaagcaatggttccggtggcaaaaactcgtgctttgtatgcaccccgatatcccgttttcgtaatgtgtgacgtgcgacaacgaaattgagcgaaaccaccccaaacatgagttttggacctaaagtagtggattgggcatgttcgttgcgaaaaacgaagaaatggttccggtggcaaaaactcgtgctttgtatgcacccgacacccgttttcggaaagcgtgacgtgcgacaacgaaattgcacgaaaccaccccaaacatgagttttggacctaaagtagtggattgggcatgttcgttgcgaaaaacgaagaaatggttccggtggcaaaaactcgtgctttgtatgcacccgacacccgttttcggaaagggtgacgtgcgacaacgaaattgcgcgaaaccaccccaaacatgagtttgggacctaaagtagtggattgggcatgttcgttgcgaaaaacgaagaaatggttccggtggcaaaaactcgtgcttttatgcacctcgatacctgttttctgaatggttgacgtgcgacaacgaaattgcgcgaaaccacctcaaacatgagttttggacctaaagtagtggattgggcatgttcgttacgaaaaacgaagaaatggttccgctggcaaaaactcgtgctttgtatgcaccccgacacccgttttcggaatgggtgacgtgcgacaacgaaattgcgcgaaaccaccccaaacatgagttttggacctaaagtagtggattgggcatgttcgttgcgaaaaacgaagaaatggttccggtggcaaaaactcgtgctttgtatgcaccccaacacccgttttcggaatgggggacgtgcgacaacaaaattgcgcgaaacccccccaaacaggatttttggacctaaagtaatggattgggcatgttctttgcaaaaaaaaaaaaaatggttccgggggcaaaaactcgtgcttttatgccccccgatacccgttttcagaatgggtgacgtgcgacatcaaaattgcgcgaaacctccccaaacatgagctttggacctaaagtagtggattaggcatgttcgttgtgaaaaacgaagaaatggttccggtggaaaaaaactcgtgctttgtatgcaccccgacacccgttttcagaatgggtgacgtgcggcaacgaaattgcgagttttggacctaaagtagtggattgggcatgttcattgcgaaaaacgaagaaatggttccggtggcaaaaactcgtgcttttatgcacctcgatacctgttttctgaatggttgacgtgcgacaacgaaattgcgcgaaaccacctcaaacatgagttttggacctaaagtagtggattgggcatgttcgttacgaaaaacgaagaaatggttccgctggcaaaaactcgtgctttgtatgcaccccgacacccgttttcggaatgggtgacgtgcgacaacgaaattgcgcgaaaccaccccaaacatgagttttggacctaaagtagtggattgggcatgttcgttgcgaaaaacgaagaaatggttccggtggcaaaaactcgtgctttgtatgcaccccgacaacccgttttcgtaatgtgtgacgtgcgacaacgaaattgcgcgaaaccaccccaaacatgagttttggacctaaagtagtggattgggcatgttcgttgcgaaaaacgaagaaatggttccggtggcaaaaactcgtgcttttatgcacctcgatacctgttttcagaatgggtgacgtgcgacaacgaaattgcgcgaaaccacctcaaactagagttttggacctaaagtagtggattgggcatgttcgttgcgaaaaacgaagaaatggttccgctggcaaaaactcgtgctttgtatgcaccccgacacccgttttcggaatgggtgacgtgcgacaacgaaattgcgcgaaaccaccccaaacatgagttttggacctaaagtagtggattgggcatgttcgttgcgaaaaacgaagaaatggttccggtggcaaaaactcgtgctttgtatgcaccccgacaaccgttttcggaatgtgtgacgtgcgataacgaaattgcgcgaaacaaccccaaacataagttttggacctaaagtagtggtttgggcatgttcgttgcgaaaaacgaagaaatggttccggtggcaaaaactcgtgctttgtatgcacccgacacccgttttcggaaagggtgacgtgcgacaacgaaattgcgcgaaaccaccccaaacatgagttttggacctaaagtagtggattgggcatgttcgttgcgaaaaacgaagaaatggttccggtggcaaaaactcgtgcttttatgcacctcgatacctgttttcagaatgggtgacgtgcgacaacgaaattgcgcgaaaccacctcaaactagagttttggacctaaagtagtggattgggcatgttcgttgcgaaaaacgaagaaatggttccgctggcaaaaactcgtgctttgtatgcaccccgacacccgttttcggaatgggtgacgtgcgacaacgaaattgcgcgaaaccaccccaaacatgagttttggacctaaagtagtggattgggcatgttcgttgcgaaaaacgaagaaatggttccggtggcaaaaactcgtgctttgtatgcaccccgacaaccgttttcggaatgtgtgacgtgcgataacgaaattgcgcgaaacaaccccaaacataagttttggacctaaagtagtggtttgggcatgttcgttgcgaaaaacgaagaaatggttccggtggcaaaaactcatgctttgtatgcaccccgacaacccgttttcggaatgtgtgacgtgcgacaacgaaattgcgcgaaaccaccccaaacatgagttttggacctaaagtagtggattgggcatgttcgttgcgaaaaacaaagaaatggttccggtggcaaaaactcgtgctttgtatgcacccgacacccgttttcggaaagggtgacgtgcgacaacgaaattgcgcgaaaccacctcaaacatgagttttggacctaaagtagtggattgggcatgttcgatgcgaaaaacgaagaaatggttccggtggcaaaaactcgtgctttgtatgcaccccgacaacccgttttcggaatgtgtgacgtgcgacaacgaaattgcgcgaaaccaccccaaacatgagttttggacctaaagtagtggattgggcatgttcgttgcgaaaaacgaagaaatggttccgctggcaaaaactcgtgcttttatgcacctcgatacctgttttcagaatggttgacgtgcgataacgaaattacgcgaaacaaccccaaacatgagttttggacctaaagtagtggattgggcatgttcgttgcgaaaaacgaagaaatggttccggtggcgtgctttgtatgcaccccgacaacccgttttcgtaatgtgtgacgtgcgacaacgaaattgcgcgaaaccaccccaaacatgagttttggacctaaagtagtggattgggcatgttcgttgcgaaaaacgaagaaatggttccggtggcaaaaactcgtgcttttatgcacctcgatacctgttttcagaatgggtgacgtgcgacaacgaaattgcgcgaaaccacctcaaactagagttttggacctaaagtagtggattgggcatgttcgttgcgaaaaacgaagaaatggttccgctggcaaaaactcgtgctttgtatgcaccccgacacccgttttcggaatgggtgacgtgcgacaacgaaattgcgcgaaaccaccccaaacatgagttttggacccaaagtagtggattgggcatgttcgttgcgaaaaacgacgaaatggttccggtggcaaaaactcgtgctttgtatgcaccccgacaacccgttttcggaatgtgtgacgtgcgataacgaaattgcgcgaaacaaccccaaacatgagttttggacctaaagtagtggtttgggcatgttcgttgcgaaaaacgaagaaatggttccggtggcaaaaactcgtgctttgtatgcaccccgagaaccgttttcggaatgtgtgacgtgcgataacgaaattgcgcgaaacaaccccaaacataagttttggacctaaagtagtggtttgggcatgttcgatgcgaaaaacgaagaaatggttccggtggcaaaaactcgtgctttgtatgcaccccgacaacccgttttcggaatgtgtgacgtgcgacaacgaaattgcgcgaaaccaccccaaacatgagttttggacctaaagtagtggattgggcatgttcgttgcgaaaaacgaagaaatggttccgctggcaaaaactcgtgcttttatgcacctcgatacctgttttcagaatggttgacgtgcgataacgaaattacgcgaaacaaccccaaacatgagctttggacctaaagtagtggattgggcatgttcgttgcgaaaaacgaagaaatggttccggtggcaaaaactcgtgctttgtatgcaccccgacaacccgttttcgtaatgtgtgacgtgcgacaacgaaattgcgcgaaaccaccccaaacatgagttttggacctaaagtagtggattgggcatgttcgttgcgaaaaacgaagaaatggttccggtggcaaaaactcgtgcttttatgcacctcgatacctgttttcagaatgggtgacgtgcgacaacgaaattgcgcgaaaccacctcaaactagagttttggacctaaagtagtggattgggcatgttcgttgcgaaaaacgaagaaatggttccgctggcaaaaactcgtgctttgtatgcaccccgacacccgttttcggaatgggtgacgtgcgacaacgaaattgcgcgaaaccaccccaaacatgagttttggacctaaagtagtggattgggcatgttcgttgcgaaaaacgacgaaatggttccggtggcaaaaactcgtgctttgtatgcaccccgacaacccattttcggaatgtgtgacgtgcgataacgaaattgcgcgaaacaaccccaaacatgagttttggacctaaagtagtggtttgggcatgttcgttgcgaaaaacgaagaaatggttccggtggcaaaaactcgtgctttgtatgcaccccgagaaccgttttcggaatgtgtgacgtgcgataacgaaattgcgcgaaacaaccccaaacataagttttggacctaaagtagtggtttgggcatgttcgatgcgaaaaacgaagaaatggttccggtggcaaaaactcgtgctttgtatgcaccccgacaacccgttttcggaatgtgcgacgtgcgacaacgaaattgcgcgaaaccaccccaaacatgagttttggacctaaagtagtggattgggcatgttcgttgcgaaaaacgaagaaatggttccggtggcaaaaactcgtgcttttatgcacctcgatacccgttttcagaatgggtgacgtgcgacaacgaaattgcgcgaaaccacctcaacattagttttggacctaaactagtggattgggcatgttcgttgcgaaaaacgacgaaatggttccgctggcaaaaactcgtgctttgtatgcacccgacacccgttttcggaatgtgtgacgtgcgacaacgaaattgcgcgaaaccaccccaaacatgagttttggacctaaactagtggattgggcatgttcgttgcgaaaaacgacgaaatggttccgctggcaaaaactcgtgctttgtatgcacccgacacccgttttcggaatgtgtgacgtgcgacaacgaaattgcgcgaaaccaccccaaacatgagttttggacctaaagtagtggattgggcatgttcgttgcgaaaaacgaagaaatggttccggtggcaaaaactcgtgctttgtatgcaccccgacaaccgttttcggaatgtgtgacgtgcgataacgaaattgcgcgaaacaaccccaaacataagttttggacctaaagtagtggtttgggcatgttcgatgcgaaaaacgaagcaatggttccggtggcaaaaactcgtgctttgtatgcaccccgacaacccgttttcggaatgtgtgacgtgcgacaacgaaattgcacgaaaccaccccaaacatgagttttggacctaaagtagtggattgggcatgttcgttgcgaaaaacgaagaaatggttccggtggcaaaaactcgtgcttttatgcacctcgatacccgttttcagaatgggtgacgtgcgacaacgaaattgcgcgaaaccacctcaacattagttttggacctaaactagtggattgggcatgttcgttgcgaaaaacgacgaaatggttccgctggcaaaaactcgtgctttgtatgcacccgacacccgttttcggaatgtgtgacgtgcgacaacgaaattgcgcgaaaccaccccaaacatgagttttggacctaaaccagtggattgggcatgttcgttgcgaaaaacgacgaaatggttccgctggcaaaaactcgtgctttgtatgcacccgacacccgttttcggaatgtgtgacgtgcgacaacgaaattgcgcgaaaccaccccaaacatgagttttggacctaaagtagtggattgggcatgttcgttgcgaaaaacgaagaaatggttccggtggcaaaaactcgtgctttgtatgcaccccgacaaccgttttcggaatgtgtgacgtgcgataacgaaattgcgcgaaacaaccccaaacataagttttggacctaaagtagtggtttgggcatgttcgttgcgaaaaacgaagaaatggttccggtggcaaaaactcgtgctttgtatgcaccccgacaacccgttttcggaatgtgtgacgtgcgacaacgaaattgcgcgaaaccaccccaaacatgagttttggacctaaagtagtggattgggcatgttcgttgcgaaaaacgaagaaatggttccggtggcaaaaactcgtgctttgtatgcccccgacacccgttttcggaaagggtgacgtgcgacaacgaaattgcgcgaaaccaccccaaacatgagttttggacctaaagtagtggattgggcatgttcgttgcgaaaaacgaagaaatggttccggtggcaaaaacttgtgctttgtatgcaccccgacacccgttttcgaaatgggtgacgtgcgacaacgaaattgcgcgaaaccaccccaaacatgagttttggacctaaagtagtggattgggcatgttcgttgcgaaaaacgaagaaatggttccagtggcaaaaactcgtgcttttatgcacctcgatacctgttttcagaatggttgacgtgcgataacgaaattacgcgaaacaaccccaaacatgagttttggacctaaagtagtggattgggcatgttcgttgcgaaaaacgaagaaatggttccggtggcaaaaactcgtgctttgtatgcaccccgacaacccgttttcgtaatgtgtgacgtgcgacaacgaaattgcgcgaaaccaccccaaacatgagttttggacctaaagtagtggattgggcatgttcgttgcgaaaaacgaagaaatggttccggtggcaaaaactcgtgcttttatgcacctcgatacctgttttcagaatgggtgacgtgcgacaacgaaattgcgcgaaaccacctcaaactagagttttggacctaaagtagtggattgggcatgttcgttgcgaaaaacgaagaaatggttccgctggcaaaaactcgtgctttgtatgcaccccgacacccgttttcggaatgggtgacgtgcgacaacgaaattgcgcgaaaccaccccaaacatgagttttggacccaaagtagtggattgggcatgttcgttgcgaaaaacgacgaaatggttccggtggcaaaaactcgtgctttgtatgcaccccgacaacccgttttcggaatgtgtgacgtgcgataacgaaat

SEQ ID NO: 604 - DNA, 818 bp, Zea mays
  VARIATION (12)..(101): /replace="c" or "g" or "t"
  misc_feature (12)..(101): /note="Nucleotides given in the sequence have no preference with respect to those in the annotations for said positions"
  source: /note="Zea mays BAC clone full insert sequence contig bacm.pk108.h15-2.fis1"
tcagggtagccaaaaaaaaaaaaaaaaaaaaaaaaaaaaaaaaaaaaaaaaaaaaaaaaaaaaaaaaaaaaaaaaaaaaaaaaaaaaaaaaaaaaaaaaaaggtcttagcccgagtccgagccctggggtcgggcggagcggagttcgtcgtcttccgggtcttagcccgagtccgagccctggggtcgggcggagcggagttcgccgtcttccgggtcttagcccgagtccgagccctggggtcaggcggagcggagtttcccatggcgccttcggcagggcctgactgcctgtcagactcactctgtcgagtggcactgtagtcggtgtggcacagccggcgctgtccttctgtcagcggctctgctgggggccgcgtgtcaggataaaggtgtcaggcaaccttggcgttaaatgctcctgcaacctggtcagtcggcgcggcgatttagtcagggttgcttctaggcgaagcccaaggcctcgggcgagccggaggtgcgtccgccgtttaaaaggggggcctcgggcgagacggaagtctctcgaggtcggctgcccttggccgaggctaggcacgagcgaagcgtgatcaagtcactcgtgtggactgatccctgacttaatcgtacccatcaggcctttgcagctttatgctgatgggggttaccagctgagattagcgtcttgagggtacccctaattatggtccccgacagatttcaggttgatcggtgagtttatcgagcgttttttcctacagtccacaaaaccacataaaattcaggttagatcttatcccagcacttttgagctt

SEQ ID NO: 605 - DNA, 848 bp, Zea mays
  VARIATION (17)..(101): /replace="c" or "g" or "t"
  misc_feature (17)..(101): /note="Nucleotides given in the sequence have no preference with respect to those in the annotations for said positions"
  source: /note="Zea mays BAC clone full insert sequence contig bacm.pk108.h15-2.fis2"
gtgcaacgcgcagtagaaaaaaaaaaaaaaaaaaaaaaaaaaaaaaaaaaaaaaaaaaaaaaaaaaaaaaaaaaaaaaaaaaaaaaaaaaaaaaaaaaaaagaatagacgaccagcccaactgcggcccatagtggacgacctagggttggccgcccctaggggctgtgccccctctctctatttatataggagttgcgcctcctttgttttttcgagttttgttttacatctagctttagctaccccagaactccacctcgagtgatattaagattgctcgcatctttttcttgttcgttcttcgattgcgcacaggaaaggatcttcgtgatcaggccgatctcgcatcagcaaggtcggtaaccattggaagttggttcagcgattgcattggcgcttcgggatcgctcgtcgtagtcggatcgtgagggtctacttccaccaaatcggaattatctccactcaccgaaagatcgggcactccagttctatcacattgccgcacgtcacccattccgaaaacgggtgtcgaagtgcatacaataacgaatttttgccaccggaaccatttcttcgtttttcgcaacgaacatgcccaatccactactttaggtccaaaacacatgtttgggagtggtttcacgcaatttcattgccgcacgtcacccattccgaaaacgggtgtcggggtgcatacaagcacgagtttttgccaccggaaccatttcttcttttttcgcaacgaacatgcccaatccactactgtaggtccaaaactcatgtttggggtggtttcgcgcaatttcgttgccgcacgtcactcgtctgaacacgggtgacagacta

SEQ ID NO: 606 - DNA, 822 bp, Zea mays
  VARIATION (13)..(98): /replace="c" or "g" or "t"
  misc_feature (13)..(98): /note="Nucleotides given in the sequence have no preference with respect to those in the annotations for said positions"
  source: /note="Zea mays BAC clone full insert sequence contig bacm.pk108.h15-2.fis3"
cagtccggcataaaaaaaaaaaaaaaaaaaaaaaaaaaaaaaaaaaaaaaaaaaaaaaaaaaaaaaaaaaaaaaaaaaaaaaaaaaaaaaaaaaaaaacgtgcggaggggtacggccaaggctcctgggcgttttatagtcgcggacgtggaccagggcactggcttggcttgggcgcggcgcgggcgccgcgcgcgggcgtgctctggcgcggcagacggcgtcgaacacgtggcggtttgtttcttccagtgttcaaatgtcgccagaggtcgcaaacgtgcgaatcttttgcaaaagtccggcgcagacctcttcctggcaccacggcctagggagggagatcttcgggtgccaaaacaggtgtgtcatactgagcatatcacgacaaaagccatgccatggcatgtcaaacgtccgagtctcgagctcaactttttccagtgggtgccctaagtggtattgcacatttttggtatagaacccaagtggttttggcgccatttttaaagtgaacacggttgatctttgatttagggctaaaatgggacttagagggaattagagagctctagctctctctccacttggagatttgaaatggggtttccctaggggcctttttgtaatatttccctcccctaattgatggttataatgttgcttagggtttgggtaaaaattacccatgttttgcacatttgctcactctctttcccctcttatccatggttttgggagatagggtttaagagaggcctagggttctttccctctctcccaaggtgatagttgcacacaattagggtaatgcctttggtc

SEQ ID NO: 607 - DNA, 867 bp, Zea mays
  VARIATION (16)..(103): /replace="c" or "g" or "t"
  misc_feature (16)..(103): /note="Nucleotides given in the sequence have no preference with respect to those in the annotations for said positions"
  source: /note="Zea mays BAC clone full insert sequence contig bacm.pk108.h15-2.fis4"
tagcatgcgcattataaaaaaaaaaaaaaaaaaaaaaaaaaaaaaaaaaaaaaaaaaaaaaaaaaaaaaaaaaaaaaaaaaaaaaaaaaaaaaaaaaaaaaaacctctctattctattcaggagctacgcctcctttattttgggagttttgttttacgttagccttagctactctcgaacacgcgcacatctgcgctgtcttcgtgtattcagaactccaccctcgagtaatagattagattgctcgcatctttttcttgttcgttcttcgattgcgcacaggaaacgatcttcgtgatcaggccgatctcgcatcagcaaggtcggtaaccacagggagttggttcagcgattgcattggcgcctcgggcttgctcgtcgtagtcggatcgcaagggtcatcttccgccaaatcggaattatctctactcgccgaaagatcgggcacctcagctacatcagggcccgtgcaagagaattgaactacatcatgctgttaaagaacgaaggcccggaagaatagacgaccagcccaactgcggcccataatggacgacctagggttggccgcccctaggggctgcgccccctctctatttatccaggagctgcgcctcctttatttttggtgttttgttttagatctagctttagctaccccagaacacgcacaaatacgtgctgtcctctgtgattcagaactccacctcgagtgatattaagattgctcgcatctttttcttgttcgttcttcgattgcgcacaggaaacgatcttcgtgatcagcctgatctcgcaggagcaaggtcgggtaaccattggaagttgggtcagcaattgcattggcccttcggattcgctcgtca

SEQ ID NO: 608 - DNA, 764 bp, Zea mays
  source: /note="Zea mays BAC clone full insert sequence contig bacm.pk108.h15-2.fis5"
tcttagatcacagcgtgggcgactgactgcacatgtcccgcttgggattcatctcatggcttccggaacacaagaacgaccggctagctgaaacacaggctggttagcggaccaggaacccatccggtggtgaaatttgccccagggtttcccattaatacaatggccgaagccatcttaaaattcagcatcgtcaacatattgatcctttacagtgtgcaaaccaaagaagacaaagcatcagcaataacattgtccttcccgttcttgtgtttaataatgtaaggaaaagactcaatgaattcgacccatttagcatgacgacggttcagatttgtttgggtacgaatatgttttaaagcctcatgatcagaatgaattatgaactcacgatgccaaagatagtgctgccatgtatgtaaagtgcgcactaacgcgtaaagctccttatcataagtagaatatttcagactagcaccgcttaatttttcactaaaataagcaactggttttccttcttgtaataaaacagcacctagcccaataccgctagcatcgcattcaagctcaaatactgtattaaaatcaggcaattgcaataggggagcttgggttaacttatctttcaaagtgctgaacgcttcctcctgcgaatcactccaagcaaatggcacatctttctttgtaagctcatgtagaggcgctgcaatggagctaaaatcacgaacaaatctgcggtagaaaccggcaagtccaagaaagct

SEQ ID NO: 609 - DNA, 754 bp, Zea mays
  VARIATION (14)..(100): /replace="c" or "g" or "t"
  misc_feature (14)..(100): /note="Nucleotides given in the sequence have no preference with respect to those in the annotations for said positions"
  source: /note="Zea mays BAC clone full insert sequence bacm.pk108.h15-2.fis6"
tcaaggtggcattaaaaaaaaaaaaaaaaaaaaaaaaaaaaaaaaaaaaaaaaaaaaaaaaaaaaaaaaaaaaaaaaaaaaaaaaaaaaaaaaaaaaaaatgaatacacgaagacagcgcagatttgcgcgcgttcgagagtagctaaggctaacgtaaaacaaaactcgagaataaaggaggcgcagctcctggataaatagagggggcgcagcccctaggggcggccaaccctaggtcgtccactatggcattcttcagtagcatgacgaagttaagatctctggcggcgcttgatgtggaggtgctgctggtgtagtcgtactcatagtgatgtgctcatcatcctccctttcttgaagtgaagtcgtcctcgacgacaactcctcatcctcggccatatatggtttcaaatctgcaacattaaaactagtgggaaacaccaaattctgcaggcaggtcaaggatataagcattatcattaatctttgttagcaccttaaaaggaccagcagcacgaggcattaatttagaacggcgcaaagtaggaaaccgatcctttctcaagtgcaaccaaaccatatcacctggctcaaaagtaacatgttttcttcctttactaccagcaacctgattttttgcattagtagcagcaatgttctgtttcgtttgttcatgtatggtaatcatttgttcaacatgtgcagcagcatctacatgtgggggcgtttgcagcattaagcgaaatcaaatc

SEQ ID NO: 610 - DNA, 813 bp, Zea mays
  VARIATION (6)..(106): /replace="c" or "g" or "t"
  misc_feature (6)..(106): /note="Nucleotides given in the sequence have no preference with respect to those in the annotations for said positions"
  VARIATION (763)..(763): /replace="c" or "g" or "t"
  misc_feature (763): /note="Nucleotide given in the sequence has no preference with respect to those in the annotation for said position"
  VARIATION (782)..(782): /replace="c" or "g" or "t"
  misc_feature (782): /note="Nucleotide given in the sequence has no preference with respect to those in the annotation for said position"
  source: /note="Zea mays BAC clone full insert sequence contig bacm.pk108.h15-2.fis7"
aagccaaaaaaaaaaaaaaaaaaaaaaaaaaaaaaaaaaaaaaaaaaaaaaaaaaaaaaaaaaaaaaaaaaaaaaaaaaaaaaaaaaaaaaaaaaaaaaaaaaaaattttgagcctcgcactttctttcaataatctgcattgttgaatttgtgtgctttcgcgtcatttattgctggttgcattgtgttcttccaccattcaaaccctagcgccgccaccatctcccgtttgatcacgccacaaaccgagtcaacatcgtttccttgtttttctccttcggttacgtaaaaaaaacagaaaaaacaaaccgagtcaacggacgtttccttatttttctccttcggttacgaaaaaaaacagaaaaaaaaacaaaccgagtcaatagccgcctccttgtttttctccttcggttacataaaaaaaacagaaaaaaagaaaacgaaggagaaaggatactgttgtctcatcccggtcgttttaaaacataacttgaggtaccttccttaaaccgggcataacttttcgctcgggtgtccaaaaaatctgaaatttttacaggaggttgttgacaccattctaaggccggccaaactcaccttcggtctgtttggtttcgacaaaattgtcaaaaagttcgggaaaataaagaaaaaaattcgtcaaagttctcgcacgcttttcagagaacttcctgattttctatagaccacatctgatctctgttttaagtgaaaactcgtgtactctattttgttgctccatgtgctgagaaaaatatcaaaaaatctacaaaaagaaaacaaaatcactt

SEQ ID NO: 611 - DNA, 881 bp, Zea mays
  VARIATION (6)..(68): /replace="c" or "g" or "t"
  misc_feature (6)..(68): /note="Nucleotides given in the sequence have no preference with respect to those in the annotations for said positions"
  source: /note="Zea mays BAC clone full insert sequence contig bacm.pk108.h15-2.fis8"
gacgaaaaaaaaaaaaaaaaaaaaaaaaaaaaaaaaaaaaaaaaaaaaaaaaaaaaaaaaaaaaaaaacgttaaccctacaacataaccaagaaacgagacatgtcgtgtgcaattgatgcattttttcatgttagcaaataactgggcagcacgcaatgcataaaaaacagcacttaaatgttccaaatgctctttcttagatttgctgtaaataaggatatcatcgaaataaacaaccacaaagaatcctatgaagggccgcagaacttcattcatcactcgcataaaagtgctgggagcattagtcaatccaaatggcataaccaaccattcatataaaccaaatttcgttttaaaagctgttttccattcatcacccagtttcattctaatctggtggtaaccactacgcaaatcaatcttagtgaaaataatggcaccactaagctcatctagcatatcatcaaggcgtggtataggatagcgataacgtatagtgatgttattaatagcacgacagtctacacacatacgccatgacccatctttcttgggaacaagtaacacaggaacagagcaagggctaagagactcacgaatgtatcctttgtcaagcaacgcctgtacctggcgctgaatctccttcgtctcatccggatttgtacggtatggtgcgcggttcggaagctgtgcgccgggaatgaggtcgatctggtgctcaatgccacgaagcggtggtagacccgatggtaagtctttgggaaagacatcagcgtactcctgcaaaaggttagcaaccatagggggaatagccaaagatggtgcatcatcaagtgaaatgaggacactagagcatacaagtgcatagcatggcaaatg

SEQ ID NO: 612 - DNA, 745 bp, Zea mays
  source: /note="Zea mays BAC clone full insert sequence contig bacm.pk108.h15-2.fis9"
tctcgattgcgcacaggaaacgatcttcgtgatcaggccgatctcgcatcagcaaggtcggtaaccacagggagttggttcagcgattgcattggcgcctcgggcttgctcgtcgtagtcggatcgcaagggtcatcttccgccaaatcggaattatctctactcgccgaaagatcgggcacttcagcttcatcatctactcgccaaaagatcgggcacctcagctacatcaattggtatcagattttcaggttgatcggtgagtttatcgagcgtttttttcctaaagtccacaaaaccacataaaaattcaggttagatcttatcccagcacccttttgagcctcgcactttctttcaataatctgcattgttgaatttgtgtgctttcgcgtttccttgttgctggttgcattgtgttcttccaccattctaaccctaacgccgccaccatctcccgtttgatcacgccacaaaccgagtcaacatcgtctccttgtttttctccttcggttacgtcaaaaaaaaacagaaaaaacaaaccgagtcaacggctgtttccttgtttttctccttcagttacgaaaaaaaaacagaaaaaaaacaaaccgagtcaacaaccgcttccttgtttttctccttcggttactcaaaaaaaaaacagaaacaaaaaaaaaaagaaaaacgaaggagaaaaggatacggttgtttcatcccggtcgtttttaaaacataacttgaggtt

SEQ ID NO: 613 - DNA, 672 bp, Zea mays
  source: /note="Zea mays BAC clone full insert sequence contig bacm.pk108.h15-2.fis10"
agctatcagtatcatatgccaaggtcgaccaagtaacaaagagcatgcttccatgggaataacatcacaatcaacaaaatcagaataagcacccatggagaaaggaacgcgtacggaacgtgtgatttttattttaccaccatcattaagccattgaatgtgatatgggtttggatgcttacgagtgggtaacgataacttttcgaccagcatggtactcgccaaattgttgcaactgccgctgtcgataatgatgcgaattgaccgctcctgcacaacaccctttgtatggaacagagtgtgtcgctgattcttctcgggcaaagcgacctgtgtactgagaacacgctgcacaacaagacttttatacatatcagcgtcgcccgggttgacatgtacctctgccttagctgcatggtcagtggcaagtagtgcatgttcaatttcttcagaatcactagcggaagagtactcaccatcgtcacgaatgagcaaagtgcgcttgtttgggcagtcccgaatcacatggccaaatcctctacaacgataacactgaatatcccgtgtacgaccagtgggtggggcagtgctggctggtttggtcgtcttctcgcgtggagtagtggtggacgtggatggcgcagggggaactggtgctgaggtggatgtcga

SEQ ID NO: 614 - DNA, 792 bp, Zea mays
  source: /note="Zea mays BAC clone full insert sequence contig bacm.pk108.h15-2.fis11"
gggagagtgcagggacgacgtgctagtgcaaggtctaatgtttctgcaggaaaatctacaccatggcaacagcgcacgactacgtccatgaccggccgtacaccagcaccaactccctcgccaagtcgaccagcacccccgccttcctccggcgacaaaccacgtgcatcttccacaaattcagcaaccaaatctgcccagaaaccagcaggtagtgcctcttcagtagcctccacgggtagaacaagagatgttctgtgttatcgatgcaagggctatggacacgtgcagcgtgattgtcctaatcagcgtgttttggtggtaaaagacgatggtgggtattcctctgctagtgatttggatgaagctacacttgctttgcttgcggctgatgatgcaggcactaaggaaccacccgaagaacagattggtgcagatgatgcagagcattatgagagcctcattgtacagcgtgtgcttagtgcacaaatggagaaggcagagcagaatcagcgacatacgttgtttcaaacaaagtgtgtcattaaggagcgttcatgtcgtttgatcattgatggaggtagctgcaacaacttggctagcagcgacatggtggagaagcttgcacttacgaccaaaccgcacccgcatccatatcacattcaatggcttaacaatagtggtaaggtcaaggtaaccaagctggtacgaattaattttgctattggtcccttcagtgagtcatgttgttgactagatgaaagcccagggagtcacgagttaagagaagtc

SEQ ID NO: 615 - DNA, 1383 bp, Zea mays
  source: /note="Zea mays BAC clone full insert sequence contig bacm.pk108.h15-2.fis12"
tagaatagcaacattcaatgacaagtggggtctttcaactttcaacgcatcaagcgtataaatacggccataccgcaaacttattttgcacgctttctggccaaccactcttgctcactcattttttagctcttgtgcactgtgatctgctaagcttttagctttgaagcttcggctttgaaaacagttttttagtgtttccgaagatgtctgaagctgctaagaaggctgctgctgaaatgaagctgagtcttgatgaagagaagaacttagggtttcttatagcaatgtcgaagaccaacacagaaaagatcaccagggaaattctggaagggctgtctgaagatactggtgacagtgaaagttatgatgtggacagcggtggcgaagactccgaagatcgcccctggcgaccaagccattcagtttatggtaaatcaactatcaaagagaatcatcttgttaatatgagaggaaggtatttccgggatctgtccattgtgagggcggacgaaggggaaaagacttgtccacaccctgaagagaatgaagttgtggtgtaccgaagctttttgaaagccggattgcgattccccttgagcagcttcgtcgtggaggtgttgaaaatcttcgaagtctatcttcatcaacttactccagaggctattataaggctaaatatcttcgtgtgggccacgagaagccaaggtctgaagcctgacgcaagaagcttctgtaatatacatgaattattatatgaaacaaagccttggggcaaagaacagtaccacaataactttggctgctacagtttcgtctctcgttccgaggcaagctgtcccgtaccaacctttcggaagagatggcccggggattggatgacagaatggttttatgtgaagaatgacctatcagcacgagaagacatcaaaggtataattatgcgtcctatttggcaaagcttcggccttcggaggccgaaggtggaaatgaatgaagctgccgaagaatgccagagggccttcggcgtcatctgctcttttattggaacaagagatttagtacaagaacatattgccttccgggtgtggccgcttgcggagaaatgggaaatgcctcaagaaaccacaaaagagaccgacgaaggtgggcttgtgagactgaagcacaccttcaagtttggagataaatttactgagccagatgacgactggctaaagagtattgaaaatttaagtgacgaattacttggtgcttattcgaaggccgaagataccgcgatgtcagcagccttcggaggccgaaaaaagaagaggctgaatcgggtatttgatgcaattgggtttgtttaccctgactattgctaccccatccgtagatttt

SEQ ID NO: 616 - DNA, 876 bp, Zea mays
  source: /note="Zea mays BAC clone full insert sequence contig bacm.pk108.h15-2.fis13"
ttaccttgatgaatttttttgacaattttgtcgaaacccaaacagaccgtaggtgagtttggccggcctcagaatggtgtcaactagctcctgtaaaaatttcagattttttggacacccgagcgaaaagttatgcccggtttatggaaggttcctcaagttatgttttaaaaacgaccgggatgaaacaaacgtatcctttctccttcgttttttttgtttctgtttttttttttatgtaactgaaggagaaaaacaaggaagcggtcgttgactcggtttgttttttttctgttttttttcgtaaccgaaggagaaaatcaaggaaacggccgttgactcggtttgttttttctgttttttttttgacgtaaccgaaggagaaaaacaaggaaacaatgttgactcggtttgtggcatgatcaaacgggagatggtggcggcgctagggtttgaatggtggaagaacacaatgcaaccagcaacaaatgacgcgaaagcacacaaattcaacaatgcagattattgaaagaaagtgcgaggctcaaaagggtgctgggataagatctaacctgaatttttatgcggttttgtggactgtaggaaaaaaaacgctcgataaactcaccgatcaacctggaaaccctttttggcatcactagtacaatatttacggtactgccattctgctagttccatccgtcctttgcacttgtggccagcaatatagtttcgtgttttgcactataattcaactttgcattattgtttggtcgtgctaatccttgacttgagtgcagcctacccagaactccacatatttctacgacgagtaggtttctgtttctccaggcaatcgctcatccaatctttcac

SEQ ID NO: 617 - DNA, 731 bp, Zea mays
  source: /note="Zea mays BAC clone full insert sequence contig bacm.pk108.h15-2.fis14"
gtttcctcagaatcactggctgaagaatactcaccattgtcacgtataagcaaggtacgcttgtttgggcagtcccgaatcatgtgcccaaaccctctgcaacgatggcactgaatatcccgtgtacgtcctgtggaagaagcggcgcctttggcagggggcgccactggcttggtcgtccctgtgcgcgatgtagtgctaggcgtagaaggtgcagggctggaaggagttgagctgtgtgttggaccccgccctgcaagagagttagtatatgtctttgatcgtcgtccctgcacttcacgttcagctttgcaagcatattcaaacaaagtggttatatcaaaataatccttataatcaagtatatcctgaatttccctgtgcaaaccaccacgaaaacgcgccatagcagcgtcatccgactcaactaaaccacaacgaagcatacccttttgtaactcctggtaatattcctcaacagactgtgaaccttgttgaaaacgctgcattttgttaagcaaatcacgagcataataggaaggaacaaatctgtggcgcatggcagcttttaattgggtccaagtaatgacactgttaatgggaagtttttgtttatactcatgccaccaaattaaagcaaaatcagtaaattcactaatggcagccttcacttggctattagcagcaatatcatggcatgaaaatttctgttctacctctaattcccaatc

SEQ ID NO: 618 - DNA, 1678 bp, Zea mays
  source: /note="Zea mays BAC clone full insert sequence contig bacm.pk108.h15-2.fis15"
tcagcgccaggtacaggcgttgcttgacaagggatacattcgtgagtctcttagcccttgctctgttcctgtgttacttgttcccaagaaagatgggtcatggcgtatgtgtgtagactgtcgtgctattaataacatcactattcgatatcgatatcctataccacgccttgatgatatgctagatgagcttagtggtgccattattttcactaagattgatttgcatagtggttaccaccagattagaatgaaactgggtgatgaatggaaaacagcttttaaaatgaaatttggtttatatgaatggttggttatgccgtttggattgactaatgttgccagcacttttatgcgagtgatgaatgaagttctgaggcccttcataggattgtttgtggttgtttattttgatgatatccttatttacagcaaatctaagaaagagcatttggaacatttaagtgttgtttttgatgcattgcatgctgcccagttatttgctaacatggaaaaatgcatcttttgcacacaacgtgtctcgtttcttggttatgttgttactccacagggcattgaggtggatagcagcaagattgctgccattcgggagtggcctacaccgacgacggtcacacaaattcggagctttcttggacttgccggtttctaccgtagatttgttcgtgattttagctccattgcagcgcctctacatgagcttacaaagaaagatgtgtcgtttgcttggagtgattcgcaggaagtagcgttcagcactttgaaagataagttaacccaagctcccctattgcaattgcctgattttaataaagtgtttgagcttgaatgcgatgctagcggtattgggctaggtgctgttttgttacaagaaggaaaaccagttgcttattttagtgaaaaattaagcggtgctagtctaaaatattctacttatgataaggagctttacgctttagtgtgcactttgcatacatggcagcactatctttggcatcgtgagttcataatccattctgatcatgaggctttaaaacatattcgtacccaaacaaatctgaaccgtcgtcatgctaaatgggtagaattcattgagtcctttccttacattattaaacacaagaacaggaaggacaatgttattgctgatgctttgtctcgtcgctataccatgctgtcacagttagattttaaaatctttggtttgcacactgtgaaagatcaatatgttgatgatgctgattttaaagatgctttcggccactgtattaatgggaaaccatggggcaaatttcacatacaggatgggttcctgtttcgcgctaacaagctgtgtgttctagctagctcggttcgtcttttgttgttacaggaagcacatggaggcggtctcatggggcactttggcgtctacaagacacatgaggtgttggctgcccacttcttttggcctcagatgcgcgctgatgttgagcgccttgttgcacggtgcactacttgtcagaaagctaagtcacggttgaacaaccatagtttgtatatgcctttgcctgttcctacttccccttggattgatatttcgatggattttgttttgggattgcctagaactaagaaggggagggatagcatttttgtggttgttgatcgattctcc

SEQ ID NO: 619 - DNA, 1679 bp, Zea mays
  source: /note="Zea mays BAC clone full insert sequence contig bacm.pk108.h15-2.fis16"
cagccataggaggtggtgtatcggttgctaaggcgcagcgtctttggaaggctgtagtcgggccgtgaacgtcgtctcctcccccaatcgagttattccacaccctctcatcgaaagatcgggcaatcacccaacgggtgcacatcagttggtaatcagagcaaggtttatcggtgagagatttacttttcttcgctgttttcttatctcctatagtccagaaaaagccaaaaaatagtagattagttttaccacaatcctataaaccattgagcatttgctagtactacttagttagggcttgttgagtttttggttgcatcggttgtgtcgagttgctggtcttagtttattcctttagagttttgagttctaccacgttttggtcaccacgagatccaccatcaccaaaaatatctctggttcgtttttgccaccacggatacatatcatatccgatttggaagtttaaatacaatctggaaagcttatcttatcttctttccaacggatctgaccttatctcaaaattcgttctgagcgctccgcaatcatcgtagagatttctggactttctatattaacaagatttgttaaatctgatttaaaggggctgttagcaatatctttattgtttgggttgtcatagtgaaaaaaaaggtttaggcccctgcaaaaaaaaacagaagaagaagaaaaaaaaagaatagaaaagaaaaaaaaaggaaaagaagaagaagggggctgaatctctaaatctgttgtttctctttgtgctgtgctagttgttctttttcagtgactacctttgtgcctaggctcacgtctctagcctggtttagcctaggaccagcacagtaccaccgttgaacgattattcagcttgcttttgtaactaacgtggtactagtgtattccttgcttcagcccacctacaactctacatatttcgactacagtttgacaggtcgtgttgctgcggcaccgatacacttattccacggttgcagacttgttggttgctgacccctcctgttgtgcaaggtaagaattggtaagagcttgtgtggcaggttgagagtgagcgccttgcagtagctacatcctaatagttgtagagttttcattccttcacgttttttttcttgttgcctctgttcgtctaaccatggcaggattggaggttgatgatgcttctcgtaatatgccacactctcctcgcaccaagggtatcatacaacactttgtaaggctggtgaagacgcacacggaaggtcttgataatgacatgcaggtgacgaatgaaaagatggggcaattggaggccacacagatcgacacaaacaccaaacttgcaaatgtggaaatgacagttgctcatattgacaagagccttgtcgcactcttgaggcggtttgatgagatgcatgctaatatcaatggtgggcgtgatgagggcgccgaaggtaactgggatgactatgttgctgataccgaacaagatgaccaagaagcacctaatcgccggcgactacgtactaaccgtagaggtatgggtggttttcgccgacgtgaggtacatggtaatgatgatgcttttagtaaggttaaatttaaaatacctccttttgatggtaaatatgaccccgatgcttacattacttgggagattgcggttg

SEQ ID NO: 620 - DNA, 1904 bp, Zea mays
  source: /note="Zea mays BAC clone full insert sequence contig bacm.pk108.h15-2.fis17"
tcaaggccaaaccacacgacgtgcacgaccacggcgatctcctattcctgctcagtgtcaccgccgtattcctgctccatctttgtggtcaatgcatcaaggcgtgccaggatggtgtcgagtgtggtgcgagtcgccgtttgagcaaggtcaagttggttgaaacgctcggtcgtcgaagtgatcgttgaatcaagccgttcatgcatcgtcctaatgtcagcagcaagtccatcaacttgtccccttacttcctgcaactgggcatccaccatgtcgtgtgctcctgccatagttagcgcaaacaccaaaaggagaaaaaccaacgacaaaaacaggggtgtactgctcacaaggcgctcacactagtgctgttatcaagttcttatccgttcttaccaagccacagtggtgaactgcaatcaacaggtggaaccggtgaaagattggatgagcgattgcgtggagaaacagaaacctgctcgtcgtagaaatatgtggagttgtgggtaggctgcactcaagtcaaggattagcacgatcaaacaataatgcaaagttgaattatagtgcaaaacacgaaactatattgctggccacaggtgcaaaggatggatggatggaaatagcagaatggcagtaacgtaaatattgtactagtgatgccaaaaaggcactagtagaaatcacaggtgattttgtttttcttttttgtatgatttttttgatatttttctcagcacaagaagcaacaagataggagctacacgaagtttcacctaaaacagatatcagatgtggtctacagaaaatcaggaagttctctgaaaagcgtgcgagaactttgacgaatttttttctttattttcctgaatttttttgacaattttgtcgaaccccaaacagaccgtaggtgagtttggccgggatcagaatggtgtcaactagctcctgtaaaaatttcagattttttggacacccgagcgaaaagttatgcccgatttacggaaggtaactcaagttatgttctagtgatgcgaccgggatgaaacaaccgtatcctttctccttcgttatcttttttttctgtttttttgacgtaaccgaaggagaaaaacaaggaagcgatgttgactcggtttgtggcgtgatcaaaagggagatggtggcggcgctagggtttgaatggtggaagaacacaatgcaaccagcaacaaatgacgcgaaagcacacaaattcaacaatgcagattattgaaagaaagtgcgaggctcaaaagggtgctgggataagatctaacctgaatttttatgtggttttgtggactgtaggaaaaaaaacgctcgataaactcaccgatcaacctggaaatctgataccaattgatgaagctgaagtgcccgatctttcggcgagtagagataattccgatttggcggaagatgacccttgcgatccgactacgacgagcaagcccgaggcgccaatgcaatcgctgaaccaactccctgtggttaccgaccttgctgatgcgagatcggcctgatcacgaagatcgtttcctgtgcgcaatcgaagaacgaacaagaacaagatgcgagcaatctaatctattactcgagggtggagttctgaatacacgaagacagcgcagatttgcgcgtgttcgagagtagctaaggctaacgtaaaacaaaactccgaaataaaggaggcgcagctcctgaataaatagagagggggcgcagcccctaggggcggccaaccctaggtcgtccattatgggccgcaattgggctggtcgtctattcttccgggccttcgttctttaacaacatgatgtagttcaattctcttgcacgggcccgagtcactggcccaggtggaaggggtggcgcctggg

SEQ ID NO: 621 - DNA, 1832 bp, Zea mays
  VARIATION (1493)..(1493): /replace="c" or "g" or "t"
  misc_feature (1493): /note="Nucleotide given in the sequence has no preference with respect to those in the annotation for said position"
  VARIATION (1511)..(1511): /replace="c" or "g" or "t"
  misc_feature (1511): /note="Nucleotide given in the sequence has no preference with respect to those in the annotation for said position"
  VARIATION (1578)..(1578): /replace="c" or "g" or "t"
  misc_feature (1578): /note="Nucleotide given in the sequence has no preference with respect to those in the annotation for said position"
  VARIATION (1594)..(1594): /replace="c" or "g" or "t"
  misc_feature (1594): /note="Nucleotide given in the sequence has no preference with respect to those in the annotation for said position"
  VARIATION (1597)..(1597): /replace="c" or "g" or "t"
  misc_feature (1597): /note="Nucleotide given in the sequence has no preference with respect to those in the annotation for said position"
  VARIATION (1603)..(1603): /replace="c" or "g" or "t"
  misc_feature (1603): /note="Nucleotide given in the sequence has no preference with respect to those in the annotation for said position"
  VARIATION (1621)..(1621): /replace="c" or "g" or "t"
  misc_feature (1621): /note="Nucleotide given in the sequence has no preference with respect to those in the annotation for said position"
  source: /note="Zea mays BAC clone full insert sequence contig bacm.pk108.h15-2.fis18"
ttaccttaattgggattgcctaggactaggaagggacgtgatagtgtgtttgtggttgttgatagattttctaagatggcacatttcataccatgtcataaaactgacgatgctactcatattgctgatttgttctttcgtgaaattgttcgcttgcatggtgtgcccaacacaatcgtttctgatcgtgatgctaaatttcttagtcatttttggaggactttgtgggcaaaattggggactaagcttttattttctactacatgtcatcctcaaactgatggtcaaactgaagttgtgaatagaactttgtctactatgttaagggcagttctaaagaagaatattaagatgtgggaggactgtttgcctcatgttgaatttgcttataatcgatcattgcattctactacaaagatgtgcccatttcagattgtatatggtttgttgcctcgtgctcctattgatttaatgcctttgccatcttctgaaaaactaaattttgatgctactaggcgtgctgaattgatgttaaaactgcatgaaactactaaagaaaacatagagcgtatgaatgctagatataagtttgctagtgataaaggtagaaaggaaataaattttgaacctggagatttagtttggttgcatttgagaaaggaaaggtttcctgaattgcgaaaatctaagttgttgcctcgagccgatggaccgtttaaagtgctagagaaaattaacgacaatgcatataggctagatctgcctgcagactttggggttagccccacatttaacattgcagatttaaagccctacttgggagaggaagttgagcttgagtccaggacgactcaaatgcaagaaggggagaatgatgaagacatccacactactgatacatctatgccaatacaagtaccaatttctggtcccattactcgtgctcgtgctcgtcaactcaaccatcaggtgattacactcttgagttcatgtccatcatatttagaccatggagacccttgcactcttgttttgcttaggaaccagggagaagaccgaaatggaaaaggatttgaacatgctggattcggactgcagaagaacaccaacttgtgacggtcaccacggtcagatgcgggctcggattggaatgttcaagcacaacatggaaagcttatcaagtctactttcatatggatccggaattatagtcatatctgttctgaggccgccgtaatcattgttttcttaccgagacatttcctgccttttctgcccatggtgctgcgtcaccctattttggcccaatgggtcgtgtatcaagttaggtccattagggacgcatcctagggttgcagcacgaccccaatacccttgtggtcgtcctcccatgtttataaaccccctagccgccaccaagaacagcgggttttgtttagatcaagtttagctctcgctacttgcttgtaagcgcgcgtgctggttcagccgcacgtcttcttgtcttcggaaccccaccatattggagtttgattttgaacctacatttagatctgggtattcagtactttgtctacatgttcttgctagttcatcaattgcatgcaggacgagtgcctaatgggccagggtgtcacgctcccaagaacgtgacaaccctaagagggggggatcggtttgctaagccaccgcccttggaaaggttgattcgggccggaaactcctccccttccccatcgggttttccaacccctccctccaaaaaaggggaaccccccaggggggccctcaaaaaaccggaaacccccggaaaccggaaattgaaacctgtt

SEQ ID NO: 622 - DNA, 2167 bp, Zea mays
  VARIATION (195)..(195): /replace="c" or "g" or "t"
  misc_feature (195): /note="Nucleotide given in the sequence has no preference with respect to those in the annotation for said position"
  source: /note="Zea mays BAC clone full insert sequence contig bacm.pk108.h15-2.fis19"
gcagaaaagcttcggcatgttcgcagaaaagggaaccgacttaaagatgaaaaggccatttgacctcgatagaatgctatagaattatcaccaaatgtaaagggcatgtatgtaattttgtgtgggttgtaccccgtgcctataaataggtgaacagtacccccgtactgttcacgctgatctggcatttgcttatgcgtcacacttgtattttcatctccttccaagccgaaggtacatttataattcgatattgtttctatttctttatgatgatataataaagttaaatgaatgatgttatatgattattcatgctatcttttatgtttcatatgcttcatttttcattaatgtatactgtgatgacgaaggttcgtccttcatggccttcgttcgaagatcgttatatcctaagggaaataatgcttcgaaggacgaaggactttatcgtttaacattctctgtgttgccttgttcttaactcatagcatttgagaacaagtccccaacattggcgcccaccgtggggtgaactcacttccatttcttgagctttttgacatcttcggcaagcatcaccttcgtcatgccgccgaagaaggcttcagcaccaggggctggcacgctgcagtcgctggaccccaatcaagacgtcctttctcttagagaggcacgaagccagaagaggaagactaccagtccaacacctccggaggatgatctagatcaggagattcaaaatctggaaatccttcagcagcaggttcaacgcaagaaggagaagatggccaggctagttgaattgcagaggcagatagatgaagcctctgaagaagttcgtcatcttgctcaggatgagcaacaccgaaggcctcagcatcaagaccttcatcaggagggctttcccaacgaagatgactggtatgacaatttccatcatgggaattttgtttttgatgatgcttctcccctgtccgctgagttacaggctacaccttggcctccgtcctacaagccgcctcagctccccgtatttgatggccactcagacccgaagcagtttttgatgagctacgaagcaacagtgtcttcgtatggtggcaatgcttcagtcatggccaaatctttcgttatggctgtcagaagtgttgctcaaacctggtattcttcccttcgaccaggaacgatcacttcatggcagaagctgaaggatttgttgttaaccagctttcaaggatttcagacgaagccggtcactgctcaggctctgttccagtgcactcaggaccacgaagaataccttcaggcatatgtccgaaggttcttgcgtctgagggcacaggcaccaacggtgcccaatgaaattgtcatcgaggccatgatcaaggggcttcggccaggtccgtcagctcagtacttcgccaggaagcctcctcaaactttggagaagcttctccagaaaatggatgaatacattcgggccgacaatgattttcgccaaagaagggaggaggctttcaggttttctgaaatgaccaggggcttcggaggaagattttacccgaggcatgtgagatcaattcacaattccacacaaaatgatgacagaggaagccaacagcaaaggccacaatgctcctcacaggcttctggtcaacagcaaagctcattccggccaccagctccaagaggcagaggcgccaggggcttcggaggaagatttgttgatcaaccgagaagaatcttttgcttattctgcggtgagaacaaaggccatactaccaggatgtgccatgttactatacagaagcaaaaggaaatagctgaagcagcagcacaacaagcccagccgaagcaggttatgcatacagcttcgtatcattcgccctacatcccagaatatgtgggcaaccatcctgcagtctctgctgcttcggcgagtcagcttcaagcttcctggcaacagcctccgcctccacctccgttgcaacagggccagcagccagaagggagccaatatgctccacatcaaagggacttcagagaacagtccgaagctcgcacggtcaacagcaccgtgccagaatcaaagcacatctattgacaaatatcctaccttaatagcaatctttttcattcagttttattttctgtaataagaaca

SEQ ID NO: 623 - DNA, 2666 bp, Zea mays
  source: /note="Zea mays BAC clone full insert sequence contig bacm.pk108.h15-2.fis20"
tgtgccgtttgcttggagtgattcgcaggaggaagcattcagcactttgaaagataagttaacccaagctcccctattgcaattgcctgattttaataaagtgtttgagcttgaatgcgatgctagcggtgttgggctaggtgctgttttgttacaagaaggaaaaccagttgcttattttagtgaaaaattaagcggtgctagtctgaaatattctacttatgataaggagctttacgcgttagtgcgcactttgcatacatggcagcactatctttggcatcgtgagttcataattcattctgatcatgaggctttaaaacgtattcgtacccaaacaaatctgaaccgtcgtcatgctaaatgggtagaatttattgagtcttttccttacattattaaacacaagaacgggaaggacaatgttattgctgatgctttgtctcgtcgctataccatgctgtcacagttagattttaaaatctttggtttgcacactgtgaaagatcaatatgttgacgatgctgattttaaagatgctttcgaccattgtattaatgggaaaccatggggcaaatttcacatacaggatgggttcctgtttcgtgctaacaagctgtgtgttccagctagctcggttcgtcttttgttgttacaggaagcacatggaggcggtctcatggggcactttggcgtctacaagacacatgaggtgttggctgcccacttcttttggcctcggatgcgcgctgatgttgagcgccttgttgcacgctgcactacttgtcagaaagctaagtcacggttgaacaaccatggtttgtatatgcctttgcctgttcctacttccccttggattgatatttcgatggattttgttttgggattgcctagaactaagaaggggagggatagcatttttgtggttgttgatcgattctccaaaatggctcatttcataccttgtcataagactgatgatgctagcaatgttgctgaattgttttttagagagattattcgtttgcacggtattcccaatacaatagtctcggatcgtgatgctaagtttctgagtcatttttggagatctctgtggaataaattgggaactaaattgctatttagcaccacttgtcaccctcagactgatggtcaaactgaggtagttaatcgaactttgtctaccatgcttagggctgttttagacaaaaatttgaaacgttgggaggattgcttacctcatgttgagtttgcttataatcatgcaacacattcttctacaaagatgtgcccttttcaaattgtttatggttacattcctagggcgcctattgctttgttttcgcttgatgctgcggacgccccacacatagatgctcttgcacatgttgaacaaatgattaatctccatgaacaaactcaacaaaacattgctgctgctaatgctaaatatcagattactggtagtaaaggccggaaactagttacttttgaacctggtgatatggtttggttgcatttgagaaaggatcgttttcctgctttgcgccgttctaaattgatgcctcgtgctgctggtccttttaaggtactaaccaagattaatgataatgcttatatccttgacctgcctgcggagtttggtgtttccactagttttaatgttgcagatttgaaaccgtatgcgggagaagatgaggagttgccgtcgaggacgacttcagttcaagatggggaggatgatgcggacatcaacaccaacacgagcacatctacaccagcagcaccttctccagcccaggcgccaccccttccacctgggccagtgactcgggcccgtgcaagagaattgaactacatcatgttgttaaagaacgaaggcccggaagaatagacgaccagcccaattgcggcccataatggacgaccttgggttggccgcccctaggggctgcgccccctctctatttattcaggagctacgcctcctttattttgggagttttgttttacgttagccttagctactctcgaacacgcgcaaatctgcgctgtcttcgtgtattcagaactccaccctcgagtaatagattagattgctcgcatctttttcttgttcgttcttcgattgcgcacaggaaacgatcttcgtgatcaggccgatctcgcatcagcaaggtcggtaaccacagggagttggttcagcgattgcattggcgcctcgggcttgctcgtcgtagtcggatcgcaagggtcatcttccgccaaatcggaattatctctactcgccgaaagatcgggcacctcagctacatcagacatcactatgagtacgactacaccagcagtgatgaggacatcactatgccacttccttcattagctgggccaatcacttgggcccgtgccagagatcttaacttcgtcatgctactgaaggcggcccatagtggacgacctagggttggccgcccctaggggctgcgccccctctatttatccaggagctgcgtctcctttattttggagttttgttttacgttagccttagctactctcgaacacgcgcaaatctgcgctgtcttcgtgtattcagaactccaccctcgagtaatagattagattgctcgcatctttttcttgttcgttcttcgattgcgcac

SEQ ID NO: 624 - DNA, 3071 bp, Zea mays
  source: /note="Zea mays BAC clone full insert sequence contig bacm.pk108.h15-2.fis21"
atcagaaaagaagacagaggcccaacactatgcccaaaagttgaaatatccaaagggggcgttgatatttaatggcagtgagaagaagatttcttgtattgcctccccgacagcaaggaaatttctgtctgtcgggagatgagcagaagcttcggattcccaactttagaagacggactttcggtgctgtcaaagaacgatctggctgacagcctagcttacaacagtttaaaggtgcgacaaatagaattcttatatttttgttgagttcaagatttttcgtttgtttaaaactattaacacagacatattcctgtctgcagggcctgatactcagcaatgccctcagagcacagaaagatgctgaggacgaaggatgtactatagccctgagcaaccttcgttccgaagtaattgaactgaggaacgaaggtctcgaaaaagacaaaatattgcattccttaataaataaaataaaagaagacgaagctattttcaaaggtcaggccgaagctcagaagtgtgaaattgaaaaccttcgtaaacaattagccagagctaaagaggaatgcatacttgaagaaacaaggcgagaactcagcgaccaatgggcaaatcatttagaagaaactgttaaagagcttcggtcagccaagaagaaatgcttcgacaaatctatagagtgtgtcaagaaaataaaaactagcttcgccagcgttggcgcattttcgcaagaagaaaactttataagaggtaaccccgaaggtcccctggaatggatcaatcatgaggcggaggcctttgaagaaattttaaatagtcgcggagacatctgcgctttttctggtgccagagggattgccactattttggaggggaaaggatgtgaacatgtaaagattttatcgcagtccgaagccaccttgtccactgaagatataaaagatccttcagccgaagctagcgcggttgggggaaaatttttcaccgacatctgggacaacggtggtagagaaatggcccaagaaatcattcacaaaagcgagaaagggattcatgaggctagaaaagtagccgaggctgctgagaaaaacgcagagcccgaagggcaaataggtactaacgaatagttttcattgcattataacttttaattttatagttcgttcgcgatctgtaataatgatgtaatagtatcccgtcctcactcagttcctactaaagcatcttcgggccctcagcctaaagatgacgacgaaattaaaaagatggccgaagctatcatggatcaagttgtcgatcgactgctgaacgaagctgcagagatagtacttagggaagactaagtgctattggagaaaacatttgatatatgatttgtgtaatattctgtaatcctgtatgtaatatacttgttttatgattcaattctttacgatgcatgaaactttaaacacgtaccatttttgagtcttcgacgaaaaaacaccttcccttcttttcatgcttcgtgaagaagaatttatcatttatcacgacaatatccatagtgttctgataagaaatatccaagcttcgtaaaaataatctccgaagctatacctcgaaaatcaatattgtttctccctgtaacttggcatgatttgccctttttcaaagcattttccgaagatcgataacatgcccccttcttgtgccacatgcagcatgatgtatgatgattatgctatgcaaaatgatgtgatgatgttatgttatgcaaaatgatattttgtgccgaagatacgcacattcctgcaatggggcacaatcttttgtatcaatactgactttttcattataagcctcccttaggagcttcttcgccttttacttcagcggaatcagcgtttatttttcgctgtaagttctgcatccccttaggaacgtctttggaacttcttcgccttttacttaggcggtataagctctgcattcccttaggaacgtctttggagcttcttcgccttttacttaggcggtatcagcgttgacttttcgctgtatgctctgcattccttttggaacgactttggagcagaaaacttacactgcgctcccttcggaacgactttttgtgacttcgtcagacttactctgcgttccttagaacgactttttgttgcttcgaaggattttcgatagtccgaaggtcctttttattatcacaaacctgtgaagaaaacatatttttcttgtaggaatcaacgaaactaattacatgaaacctaaacaatgtcctttattacaaaaaataaaactgaatgaaaaagattgctattaaggtaggatatttgtcaatagatgtgttttgactctggcacggtgctgttgaccgtgcgagcttcggactgttctctgaagtccctttgatgtggagcatattggctcccttctggctgctggccttgttgcaacggaggtggaggcgggggctgttgccaggaagctgaaggctgacttgccgaagcagcagagactgcaggatggttgcccacatattctgggatgtagggcgaatgatacgaagcagtgtgcatgacctgcttcggctgagcctgttgcgcggcagcttcggctatctctttttgcttttgaatggtaacatgacacatcctggtagtatgacctttgttttcaccacagaataagcaaaatattcttctgggttgatccccgaatcttccgccgaagcccctggcgcctctgcctcttggagctggtggtcggaaggagctttgctgttgccccgaagcctgtgaggagtactgtggcctttgctgctggctccccttatcatcattttgattggaattatgaattgatctgacatgcctcggatagaatcttcctccgaagcccctggtcatctcagaaaatctgaaggcctcctcccttctttggcgaaaatcattgtcagctcgaatatattcatccatcttctggagcagcttctccagcgtttgtggtggcttcctggcaaaatactgcgctgatggccctggccgaagccccttgatcatggcctcata

SEQ ID NO: 625 - DNA, 2855 bp, Zea mays
  VARIATION (2754)..(2754): /replace="c" or "g" or "t"
  misc_feature (2754): /note="Nucleotide given in the sequence has no preference with respect to those in the annotation for said position"
  VARIATION (2813)..(2813): /replace="c" or "g" or "t"
  misc_feature (2813): /note="Nucleotide given in the sequence has no preference with respect to those in the annotation for said position"
  VARIATION (2837)..(2837): /replace="c" or "g" or "t"
  misc_feature (2837): /note="Nucleotide given in the sequence has no preference with respect to those in the annotation for said position"
  source: /note="Zea mays BAC clone full insert sequence contig bacm.pk108.h15-2.fis22"
tttttggggcggttaaattggggaaattcaagccatccttgcttataaagattatgctaatgtaacccgattatttcattcttgtttgcaaagctgaaaggaaagtgcagggacgacgtgctagtgcaaggtctaatgtttctgcaggaaaatctacaccatggcaacagcgcacgactacgtccatgaccggccgtacaccagctccaactcccttgccaagtcgaccagcacccccgccttctccgggcgacaaaccacgtgcaccttccacaaattcagcaaccaaatctgcccagaaaccagcaggtagtgcctcttcagtagcctccacgggtagaacaagagatgttctgtgttatcgatgcaagggctatggacacgtgcagcgtgattgtcctaatcagcgtgtttttggtggtaaaagacgatggtgggtattcctctgctagtgatttggatgaagctacacttgctttgcttgcggctgatgatgtaggcactaaggaaccacccgaagaacagattggtgcagatgatgcagagcattatgagagcctcattgtacagcgtgtgcttagtgcacaaatggagaaggcagagcagaatcagcgacatacgttgtttcaaacaaagtgtgtcattaaggagcgttcatgtcgtttgatcattgatggaggtagctgcaacaacttggctagcagcgacatggtagagaagcttacacttacgaccaaactgcacccgcatccatatcacattcaatggctcaacaatagtggtaaggtcaaggtaaccaagctggtacgaattaattttgctattggttcatatcgtgatgttgttgactgtgatgttgtgcctatggatgcttgtaatattctgctaggtagaccatggcaatttgattcagattgtatgcatcatggtagatcaaatcaatattctctcatacaccatgataagaaaattattttgcttcccatgtcccctgaggctattgtgcgtgatgatgttgctaaagctaccaaagctaaaactgagaacaacaagaatattaaagctgttggtaataacaaagatgggataaaattgaaaggacattgcttgcttgcaacaaaaactgatgttaatgaattatttgcttccactactgttgcctacgccttggtatgcaaggatgctttgatttcaattcaagatatgcagcattctttgcctcctgttattactaacattttgcaggagtattctgatgtatttccaagtgagataccagaggggctgccacctatacgagggattgagcaccaaattgatcttattcctggtgcatctttgccgaatcgtgcgccatataggacatatccagaggaaacaaaagaaattcagcgacaagtgcaagaactactcgacaaaggttatgatgaagacatccacactactgatgcatctataccaatacaagtaccaatttctggtcccattactcgcgctcgtgctcgtcaactcaaccatcaggtgattacactcttgagttcatgtccattatatttagaccatggagacccgtgcactcttgttttgcttaggaatcagggagaagaccgaaagggaaaaggatttgaacatgctggattcggactgcagaagaacaccaacttgtgacggtcaccacggtcagatgcgggctcggattggaatgttcaagcacaacatggaaagcttatcaagtctactttcatatggatccggaattatagtcatatctgttctgaggccgccgtaatcattgttttcttaccgagacatttcctgccttttctgcccatggtgctgcgtcaccctattttggcccaatgggtcgtgtatcaagttaggtccattagggacgcatcctagggttgcagcacgaccccaatacccttgtggtcgtcctcccatgtttataaaccccctagccgccaccaagaacagcgggttttgtttagatcaagtttagctctcgctacttgcttgtaagcgcgcgtgctggttcagccgcccgtcttcttgtcttcggaaccccaccatattggagtttgattttgaaacctacatttagatctggtaattcagtacttgttctacttgttcttgctagttcttcgattgcttgcaggacgagtgccctagtggccagggtgtcacgctccacaagatcgtgacaaccataggaggtggtgtatcggttgctaaggcgcagcgtctttggaaggctgtagtcgggccgtgaacgtcgtctccttccccaatcgagttattccacaccctctcatcgaaagatcgggcaatcacccaacgggtgcacatcaaaaacactcgataaactcaccgatcaacctggaaatctgataccacttgatagagctggagtgcccgatcttttggtgagtggagataattccgatttggtggaagtagaccctcacgatccgactacgacgagcgaacccgaagcgccaatgcaatcgctgaaccaactcccaatggttaccgaccttgctcctgcgagatcagcctgatcacgaagatcgtttcctgtgcgcaatcgaagaacgaacaagaaaaagatgcgagcaatcttaatatcactcgaggtggagttctgaatcacagaggacagcacgtatttgtgcgtgttctggggtagctaaagctagatctaagacaaaacaccaaaaataaaggaggcgcagctcctggataaatagaagagggggcgcagccccctagggggcgccaaaccctaggtcgtccattatggggcgcaattgggctggtcgtctattcttccagggctttcgtctttaaca

SEQ ID NO: 626 - DNA, 3129 bp, Zea mays
  VARIATION (2987)..(2987): /replace="c" or "g" or "t"
  misc_feature (2987): /note="Nucleotide given in the sequence has no preference with respect to those in the annotation for said position"
  VARIATION (3074)..(3074): /replace="c" or "g" or "t"
  misc_feature (3074): /note="Nucleotide given in the sequence has no preference with respect to those in the annotation for said position"
  VARIATION (3086)..(3086): /replace="c" or "g" or "t"
  misc_feature (3086): /note="Nucleotide given in the sequence has no preference with respect to those in the annotation for said position"
  source: /note="Zea mays BAC clone full insert sequence contig bacm.pk108.h15-2.fis23"
ataggaggtggtgtatcggttgctaaggcgcagcgtctttggaaggctgtagtcgggccgtgaacgtcgtctcctcccccaatcgagttattccacaccctctcatcgaaagatcgggcaatcacccaacgggtgcacatcataaccgctacgcaaatcaaccttagagaaaataacggcaccactaagctcatctaacatatcatcaaggcgtggaataggatatcgataacgaactgtgatgttattaatagcacgacaatctacgcacatacaccatgacccatcttactttggaacgagtaaaacaggaaccgagcaagggctaagagactcacgaatgtaatccttatcaagcagcgtctgcacctggtgctggatctccttcgtctcctctggatttgtacggtacggggcgcggttcggaagagaagcgccggggatgagatcgatctgatgctcaatgccacggaggggaggaagacccggtggtaagtccgtaggataaacatcagcatactcctgcaaaaggttaacaacagcagggggtatatccaaagacggtgcatcatcaagcggaacaagcatgcgcgagcatacaagtgcataacagggcatatgagcttcatggagatcatcaaaatcagcacgtgtagcaagtaaaacaggagagtgcaacttgatttcagatttaataggtgcggctgatgtcgatttgacttgttgtgcagttttagcagccctagtaagatcatctttcaaaatttggtcaggggtcattggatgtataattattttctggcctttaaacatgaaagaataatgatttgaacgaccatgatgtaaactatcagtatcatattgccaaggtcgacccaataacaaagagcatgcttccataggaataacatcgcaatcagcataatcagaataagaacccagcgaaaaggggacacgtaccaaacatgttacctttattttaccaccatcattaagccattgaatgtgatacggatgtggatgtgtgcgagtgggcaaggataatttctctaccaacgctgtacttgccaaattgttgcagctgccactatcgatgatgatgcgaatcgaccgttcgtgcacgacgcccttggtatggaatagagtgtgtcgctgatttttttcggcctgggcaacctgtgtgctgagaacacgctgcacaacaagactctcatacctatcggcgtcgatgggatcaacgtggacttcctcattttctgcatggttagtggcaatcatagcatgactagtttcctcagaatcactggctgaagagtactcaccattgtcacgtataagcaaggtacgcttgtttgggcagtctcgaatcatgtgcccaaaccctctgcaacgatggcactgaatatcccgtgtacgtcctgtggaagaaccagcgcctttggcagggggcgccactggcttggtcgtccttgtgcgcgatgtagtgctaggcgtagaaggtgcagggctggaaggagttgagctgtgtgttggaccccggcctgcaaaagagttagtatatgtctttgatcgtcgtccctgcacttcacattcagctttgcaagcatattcaaacaatgtggttatatcaaaataatccttataatcaagtatatccagaatttccctgttcaaaccaccacgaaaacgcgccatagcagcgtcatccgactcaaccaaaccacaacgaagcatacccttttgtaacttgttggggaccttcggcgtccgaaggtcctcaaaaacagaatttaacagtatttctgtagtacaatatgtgaacaggtaccctcagactaaaatcggcattgcagcagaccggaataatacgaagcttgatacagagccgaagctgttgagcaggaaagcttcggcgtaacagcagagagtggaaccgacttaaagatgaaaaggctattcagacctcaatagattactatagagttattgttagatgtaaagggcatgaatgtaattttgtaagggctgtgtcccgtgtctataaataggtgaacagtatccctgtactgttcacgctgacttggcattcgctttttgcgtcacgcttgtacaatcatttccttccgattgaaggtacacttgttgttcaataatatttttgtttatgttcaataataataaatgattgttcatgttttcctttacattcttcacatttcatccttcgtcattatttgattaatttatgaaggtatgtccttcataaccttcgtccgcaaggcattatgtcctaagggaaatagtgcttcgaaggacgaagggcattaacgattaacattttctatgttgccttgttcttaaactcttagcacttgagaacaagtccccaacattggcgcccacctccggtgaactcacttccatttcttgagctttgaataccttcggcgagcgtcaccttcgtcatgccgccgaagaaggcttcaacaacaggagctggcacactgcagtcgctggatcccaatcaggatgttatttctcttagagaagcccgaagccagaaaaggaaggctgtcagtccaacacctccggatgatgatcttgatcaggaaattcaaaatttagagatccttcagcaacaagttcagcgcaggaaggaaaagatggctcgtctagctgatcttcagagacagatagatgaagcttcggaagaggtccgtcatttcgttcaaggcgatcaaacccgaaggcctccacgcagagagcttcatcaggaagatttccgcaatgaagacgactggtatgaagatctccatcatggaaactttgcttttgatgatgcttctcctctttcaacagaattgcaggctacaccttggccacagacttacaagccaccccagcttcccatatatgacggtcactcagacccgaagcaattcctaatgagctacgaggcaacaatatcttcatacggtggcaatacagcagtcatggcaaaatccttcgtcatggccgtcagaagtgttgctcaaacctggtactcttctcttcggccagggacaatcacttcatggcgaaactgaaggaatgctcataactaggttccaagggttcaaacaaagcggt

SEQ ID NO: 627 - DNA, 2841 bp, Zea mays
  source: /note="Zea mays BAC clone full insert sequence contig bacm.pk108.h15-2.fis24"
gaccgcgtatagactcctatcgggcgagggggttccctaccctcgtcgaggtcgacggtatcgttccgcaaagaggggcacatttaacattgcagatttaaagccctacttgggagaggaagttaagcttgagtcgaggacgactcaaatgcaagaaggggagaatgatgaagacatccacactactgatgcatctataccaatacaagtaccaatttctggtcccattactcgcgctcgtgctcgtcaactcaaccatcaggtgattacactcttgagttcatgtccatcatatttagaccatggagacccgtgcactcttgttttgcttaggaatcagggagaagaccgaaagggaaaaggatttgaacatgctggattcggactgcagaagaacaccaacttgtgacggtcaccacggtcagatgcgggctcggattggaatgttcaagcacaacatggaaagcttatcaagtctactttcatatggatccggaattatagtcatatctgttctgaggccgccgtaatcattattttattaccgagacatttcctgccttttctgcccatggtgctgcgtcaccctattttggcccaatgggtcgtgtatcaagttaggtccattagggacgcatcctagggttgcagcacgaccccaatacccttgtggtcgtcctcccatgtttataaaccccctagccgccaccaagaacagcgggttttgtttagatcaagtttagctctcgctacttgcttgcaagcgcgcgtgctagttcagccgcccgtcttcttgtcttcggaaccccaccatattggagtttgatctttaaacctacatttagatctggtaatttagtacttgttctacttgttcttgctagttcttcgattgcttgcaggacgagtgccctagtggccagggtgtcacgctccacaagatcgtgacagccataggaggtggtgtatcggttgctaaggcgcagcgtctttggaaggctgtagtcgggccgtgaacgtcgtctcctcccccaatcgagttattccacaccctctcatcgaaagatcgggcaatcacccaacgggtgcacatcagaaggtgctgctggtgtagatgtgctcgtgttggtgttgatgtccgcatcatcctccccttcttgaactgaagtcgtcctcgacggcaactcctcatcttctccctcatacggtttcaaatctgcaacattaaaactagtggaaacaccaaactccgcaggtaggtcgagggtataagcattatcattaatcttggttagtatcttaaaaggaccagcagcacgaggcatcaatttagagcggcgcaaagtaggaaaacgatcctttctcaaatgcaaccaaaccatatcaccaggttcaaaagtaacatgttttcttcctttactaccagcaacctgattttttgtattagtagcagcaatgttctgtttcgtttgttcatgtatggtaatcatttgttcaacatgtgcagaagcatctacatgtggggcgttcgcagcattaagtgaaatcaaatcaataggtgccctaggaatgtaaccataaacaatctggaaagggcacatctttgtagaagaatgcgtggcatgattgtaagcaaattcaacatgaggtaagcaatcctcccaacgtctcaaattcttgtctaaaacagccctaagcatggtagataaagttctatttactacctcagtttgtccatcagtctgagggtgacaagtagtgctaaacaacaatttagttcccaatttattccaaagagatctccaaaaatggcttagaaacttagcatcgcgatcagagactattgtttttggaataccatgtaaacgaataatttctctaaagaacaattcagcaacaatgctagcatcatcagttttatgacaaggtataaagtgagccattttagagaatctatcaacaaccacaaaaatactatccctccccttcttagttctaggcaagcccaaaacaaagtccatagaaatatcaagccaaggagaagaagggacaggcaaaggcatatacaaaccatggttgttcaaccgtgacttagctttctgacaagtagtgcagcgtgcaacaaggcgctccacatcagcgcgcatccgaggccaaaagaagtgggcagccaacacctcatgtgtcttgtagacgccaaaatgccccatgagaccgcctccatgcgcttcctgtaacaacaaaagacgaaccgagctagctggaacacacaacttgttagcgcgaaacaggaacccatcctgtatgtgaaatttgccccatggtttcccattaatacaatggccgaaagcatctttaaaatcagcatcgtcaacatattgatccttcacagtgtccaaaccaaagattttaaaatctaactgtgacagcatggtatagcgacgagacaaagcatcagcaataacattgtccttcccgttcttgtgtttaataatgtaaggaaaggactcaatgaattctacccatttagcatgacgacggttcagatttgtttgggtacgaatatgttttaaagcctcatgatcagaatggattataaactcacgatgccaaagatagtgctgccatgtatgcaaagtgcgcactaaagcgtaaagctccttatcataagtagaatatttcagactagcaccgcttaatttttcactaaaataagcaactggttttccttcttgtaacaaaacagcacctagcccaataccgctagcatcgcattcaagctcaaacactttattaaaatcaggcaattgcaataggggagcttgggttaacttatctttc

SEQ ID NO: 628 - DNA, 2910 bp, Zea mays
  VARIATION (2763)..(2763): /replace="c" or "g" or "t"
  misc_feature (2763): /note="Nucleotide given in the sequence has no preference with respect to those in the annotation for said position"
  VARIATION (2776)..(2776): /replace="c" or "g" or "t"
  misc_feature (2776): /note="Nucleotide given in the sequence has no preference with respect to those in the annotation for said position"
  VARIATION (2793)..(2793): /replace="c" or "g" or "t"
  misc_feature (2793): /note="Nucleotide given in the sequence has no preference with respect to those in the annotation for said position"
  VARIATION (2824)..(2824): /replace="c" or "g" or "t"
  misc_feature (2824): /note="Nucleotide given in the sequence has no preference with respect to those in the annotation for said position"
  VARIATION (2888)..(2888): /replace="c" or "g" or "t"
  misc_feature (2888): /note="Nucleotide given in the sequence has no preference with respect to those in the annotation for said position"
  source: /note="Zea mays BAC clone full insert sequence contig bacm.pk108.h15-2.fis25"
aaggattgcttgcctcatgttgaatttgcttacaatcatgccacgcattcttctacaaagatgtgccctttccagattgtttatggttacattcctagggcacctattgatttgatttcacttaatgctgcgaacgccccacatgtagatgcttctgcacatgttgaacaaatgattaccatccatgaacaaacgaaacagaacattgctgctactaatacaaaaaatcaggttgctggtagtaaaggaagaaaacatgttacttttgaacctggtgatatggtttggttgcatttgagaaaggatcgttttcctactttgcgccgttctaaattgatgcctcgtgctgctggtccttttaagatactaaccaagattaatgataatgcttataccctcgacctacctgcggagtttggtgtttccactagttttaatgttgcagatttgaaaccgtatgcgggagaaaatgaggagttgccgtcgaggacgacttcagttcaagaaggggaggatgatgcggacatcaacaccaacacgagcacatctacaccagcagcaccttctccagcccaggcgcgaccccttccacctgggccagtgactcgggcccgtgcaagagaattgaactacatcatgttgttaaagaacgaaggcccggaagaatagacgaccagcccaattgcggcccataatggacgacctagggttggccgcccctaggggctgcgccccctctctatttattcaggagctgcgcctcctttatttcctgagttttgttttacgttagccttagctactctcgaacacgcgcaaatctgcgctgtcttcgtgtattcagaactccaccctcgagtaatagattagattgctcgcatcttgttcttgttcgttcttcgattgcgcacaggaaacgatcttcgtgatcaggccgatctcgcatcagcaaggtcggtaaccacagggagttggttcagcgattgcattggcgcctcgggcttgctcgtcgtagtcggatcgcaagggtcatcttccgccaaatcggaattatctctactcgccgaaagatcgggcacctcagctacatcacacaggaaacgatcttcgtgatcaggccgatctcgcatcagcaaggtcggtaaccacagggagttggttcagcgattgcattggcgcctcaggcttgctcgtcgtagtcggatcgcaagggtcatcttccgccaaatcggaattatctctactcgccgaaagatcgggcacctcagctacatcatgttgtgcttgaacattccaatccgagcccgcatgtgaccgtggtgaccgtcacaagttggtgttcttctgcagttcgaatccagcatgttcaaatccttttccctttcggtcttctccctggttcctaagcaaaataagagtgcacgggtctccatggtctaaatatgatggaaatgcactcaagagtgtaatcacctgatggttgagttgacgagcacgagcgcgagtaatgggaccagaagtaatgggaccagaaattggtacttgtattggcatagatgtatcagtagtgtggatgtcttcatcattctccccttcttgcatttgagtcatcctcgactcaagctcaacgtcctctcccaagtagggctttaaatctgcaatgttaaatgtggggctaaccccaaagtctggaggcagatctagcctatatgcattgtcgttaattttctctagcactttaaatggtccatcggctcgaggcaacaatttagattttcgcaattcaggaaacctttcctttctcaaatgcaaccaaactaaatctccaggttcaaaatttatttcctttctacctttatcactagcaaacttatatctagcattcatacgctctatgttttctttagtagtttcatgcagttttaacatcaattcagcacgcctagtagcatcaaaatttagtttttcagaagatggcaaaggcattaaatcaataggagcacggggcaacaaaccatatacaatctgaaatgggcaaatctttgtagtagaatgcaatgatcgattataagcaaatgcaacatgaggcaaacagtcctccaacatcttaatattcttctttagaaccgcccttaacatagttgacaaagttctattcacaacttcagtttgaccatcagtttgaggatgacatgtagtagaaaataaaagcttagtccccaattttgcccacaaagtcctccaaaaatgactaagaaatttagcatcacgatcagaaacgattgtgttggtacaccatgcaagcgaacaatttcacgaaagaacaaatcagcaatatgagtagcatcgtcagttttatgacatggtatgaaatgtgccatcttagaaaatctatcaacaaccacaaacacactatcacgtcccttcctagtcctaggcaatcccagcacaaaatccatagaaatatcttcccaaggaccactaggaacgggtagaggcaaatacaaaccgtgtggatttaaccgtgacttcgccttttgacatgtcgtgcaacgagcaaccaatctcaccacatctcttctcatctggggccaaaagaaatgaccagcaagtatgtcctccgttttctttgctccaaaatgtcccattaagccacctccatgtgcttcctgtaacaacaacaaacgaacggagctagctggaatgcatagcttgttagctctaaacacaaacccatcactaacgatatatttgttccatccatttccatctttaacatgcagcaacacatcatttgaatcagcatcatatgcagaacactatagagagcctggttgtaagacgtgtcttgagtgcccaaattataaagctgaaacaaacagcgacaacacctgttccaaactaaatgtg

SEQ ID NO: 629 - DNA, 3874 bp, Zea mays
  source: /note="Zea mays BAC clone full insert sequence contig bacm.pk108.h15-2.fis26"
tttctcttgctcgctcgatttttagcttttgcgcgctaagattccctgtgtctttagttttaaagcttcggcattgaaaatagttttttagtgtttccgaagatgtctggagacaagaaagctgttactgaggcgaaactgtctcttgatgaggaaaaaaacctggggtttcttatagcgatgtcgaagacaaacacggaaaaaatcaccaaggaaattctggaaggcttgtctgaagatactggtgacagtgacagttttgatgtagatagtggcggtgaagactccgaagatcgcccctggcgaccaagtcatgcggttttcggcaaatcagctatcaaagaaaaccatcttgccaatttgaggggaaggtatttccgggatctgtccattgtgagggctgacgaaggggaaaagacttgtccacaccctgaagaaaatgaagttgtggtgtaccgaagctttttgaaagctggattgcgattccccttgagcagcttcgtcgtggaggtgttgaaaatcttcgaagtctatcttcatcaacttactccagaggcgattataaggctaaatatcttcgtgtgggccacgagaagccaaggtctgaagcctgacgcaagaagcttctgcaatatacatgaattattatatgaaacaaagccttggggcaaagaacagtaccacaataactttggctgctacagtttcgtctctcggtccggggcaagctgtcccgtaccaacctttcggaagagatggcccggggattggatgacagaatggttttatgtgaagaatgacctatcagcacgagaagacatcaaaggtataatcatgcgtcctatttggcaaagcttcggccttcggaggccgaaggtggaaatgaatgaagctgccgaagaatgccagagagccttcggcgtcatctgctcttttatcggaacaagagatttagtacaaaaacatattgccttccgggtgtggccgcttgcggagaaatgggaaatgcctcaagaaactataaaagagaccgacgaaggtggtcttgtgagactgaagtacaccttcaagtttggagataaatttactgagcgagatgacgactggctaaagagtattgaaaatttaagtgacgaattgcttggtgcttattcgaaggccgaagatacggcgatgtcagcagccttcggaggccgaaaaaagaagaggctgaatcgggtatttgatgcaattgggtttgtttaccctgactattgctaccccgtccgaagacagaaaaggaagaacataacttctgcaaaagaagctgcaactgctcctagcgagccagagcctgaaagaaagaaaataaaagtcctcactcaccggccgcgttatatcgaaccagcttcggtgccggagtttactgagaaatcttcttcggttaccgaggctgaaaagccaactagaccagtcatgccacctgcagctgcagggataaccgaaacggcgaaaaagatagaactagaagaaccgaaggtttcgctgccagaaaccaaagaaatggccgaagcgctatccacagaaaaaattgcagaagtggaaaaaccaactgaagaaaaagtaccagaaattgtgagtcctgcagcaaatgttgagacaacaaaaaatcaaaaagcgccagcagtgactccaaaaagaagaagaatggcgaatgtgctagatgtactagaaacaattaagacttcaagcacacctccgaagaaggctgttgttactcctgaaacaacagctgaaatttctggttctacagctccagggcaagaaattgaagccgaagctgggccctcagagcccgcaaaggcaaaaaccttggaaagtgaggcagaaaaaataacaaagccaacctttgctgaagaaactggtgttgttacccccgaagcatcctccaaaattcgtgattatatttttcgtcatgcttcggggaaaaaattatcagaaaaagaacaacaagaggcccaacactatgcccaaaagttgaaatatccaaagggggcgttgatatttaatggcagtggagaagaagatttcttgtattgtctccccgacagcaaagaaatttctgtctgtcgggagatgagcagaagcttcggattcccaactttagaagacggactttcggtgctgtcaaaaaacgatctggctgacagtctagcttacaacagtttaaaggtgggacaaatggaattcttgtatttttttgtcgagtttaaaatttttcgtttgtttaaaactattgacacagacatgctcctgtttgcagggcctgatgctcagtaatgccctcagggcacagaaagatgctgaagacgaaggttgtactatagccctgagcaaccttcgttccgaagtaattgaactgaggaacgaaggtctcgaaaaagacaaaatattatactcattaatagataaaataaaggaggacgaagctgcttttaaaagtcaagctgaagctcagaaacgcgaaattgaagaccttcggaaacaactggcgagagccaaagaagaacgtatacttgaagaaacaaagcgtgaactcagcgatcaatgggcagatcacctagaagtgactgttgaagagcttcgttcatccaaaaagagatgctacaataaatctatagattgcgttaaaaaattaaaggctagcttcgccaaggtcggcgcattctcaagtgaagaaaacttttcgagaggcaatcccgaaggtgtcattgaatggattgaccatgaagctgaagccttcgaagaaattttaaatagccgaggagatatatgtgccttctctggcgccagagggattgccaccatcttagagaagaagggctgcgaacatgtaaaaattttagcacagtccgaagctgccttgtcctatgaagatacaagagacccctcggccgaagctagcataattggtggaaagttttttaccgatatctgggataatggtggccgagaaatggccggagaaattattcgaagaagtgaaaagggcattcatgatgctagagaagtagctgaggctgctgaaaagagcgcagaggccgaaggtcaattaggtattaaataatagtttttatcgtgttgtaatcttaggctttaagatttgtttgcaacttgtaacagcaaagcagccgtgtcctgtccttcctcagatcctactgaagtatctccgggtgcacggcctaagggtgacgatgagattaaaaagatggctgaagctattatggatgaagttgtcgatcgactgttgaacgaagctgcagaagtggtacttagggaagactagatgctattgtaaaaacattttaaatgtaacatatgtaatatcttgtaatcctgtatgtaacatatttgttttatttctctttatggttcaattctttacgatgcatgaaacttttcatacataccttttttgagtctggcgaaaaaacaccttcccttcttttcatgcttcgtgaagaaaaatttctatgtatcacaacaatgtccatagtgctcagatgaagaatatccaagcttcgtgaaaacattctccaaagctatactccgaagatgaagattgtgtctccttgtgacaacacgattttcactctttcaaagcatacttccgaagatcaatattgtgtccccttcttgtgccatatgcaacatgatgtatgatgctcatgctatgcaaaatgatgtgatgatgttatgttatgtagatgacatttgttccgaaagatacacacatatccccacacaatatttttgtattagcgctgattcttcgctgtaagctctgcattcccttaggaacgtctttggagcttcttcgccttttacttaggcg

SEQ ID NO: 630 - DNA, 4935 bp, Zea mays
  source: /note="Zea mays BAC clone full insert sequence contig bacm.pk108.h15-2.fis27"
cacaaaagccctccccttcttagttctaggcaagcccaaaacaaagtccatagagatatcaagccaaggagaagaagggacaggcaaaggcatatacaaaccatggttgttcaaccgtgacttagctttctgacaagtagtgcagcgtgcaacaaggcgctccacatcagcgcgcatccgaggccaaaagaagtgggcagccaacacctcatgtgtcttgtagacgccaaaatgccccatgagaccgcctccatgcgcttcctgtaacaacaaaagacgaaccgagctagctggaacacaaagcttgttagcgcgaaacaggaacccatcctgtatgtgaaatttgccccatggtttcccattaatacaatggccgaaagcatctttaaaatcagcatcgtcaacatattgatccttcacagtgtgatgaagacatccacactactgatgcatctataccaatacaagtaccaatttctggtcctattactcgcgctcgtgctcgtcaactcaaccatcaggtgattacactcttgagttcatgtccatcatatttagaccatggagacccgtgcactcttgttttgcttaggaatcagggagaagaccgaaagggaaaaggatttgaacatgctggattcggactgcagaagaacaccaacttgtgacggtcaccacggtcagatgcgggctcggattggaatgttcaaggacaacatggaaagcttatcaagtctactttcatatggatccggaattatagtcatatctgttctgaggccgccgtaatcattgttttcttaccgagacatttcctgccttttctgcccatggtgctgcgtcaccctattttggcccaatgggtcgtgtatcaagttaggtccattagggacgcatcctagggttgcagcacgaccccaatacccttgtggtcgtcctcccatgtttataaaccccctagccgccaccaagaacagcgggttttgtttagatcaagtttagctctcgctacttgcttgtaagcgcgcgtgctggttcagccgcccgtcttcttgtcttcggaaccccaccatattggagtttgatttggaaacctacatttagatctggtaattcagtacttgttctacttgttcttgctagttcttcgattgcttgcaggacgagtgccctagtggccagggtgtcacgctccacaagatcgttacagccataggaggtggtgtatcggttgctaaggcgcagcgtctttggaaggctgtagtcgggccgtgaacgtcgtctcctcccccaatcgagttattccacaccctctcatcgaaagatcgggcaatcacccaacgggtgcacatcacagtgtccaaaccaaagattttaaaatctaactgtgacagcatggtatagcgacgagacaaagcatcagcaataacattgtccttcccgttcttgtgtttaataatgtaaggaaaggactcaatgaattctacccatttagcatgacgacggttcagatttgtttgggtacgaatatgttttaaagcctcatgatcagattggatataaactcacgatgccaaagatagtgctgccatgtatgcaaagtgcgcactaaagcgtaaagctccttatcataagtagaatatttcagactagcaccgcttaatttttcactaaaataagcaactggttttccttcttgtaacaaaacagcacctagcccaataccgctagcatcacattcaagctcaaacactttattaaaatcaggcaattgcaataggggagcttgggttaacttatctttcaaagtgctgaacgctacctcctgcgaatcactccaagcaaacggcacatctttctttgtaagctcatgtagaggcgctgcaatggagctaaaatcacgaacaaatctgcggtagaaaccggcaagtccaagaaagctccgaatttgtgtgaccgtcgtcggtgtaggccactcccgaatggcagcaatcttgctgctatccacctcaatgccctgcggagtaaccacataaccaagaaacgagacacgttgcgtgcaaaatgtgcacttttccatgttaccaaacaagcgagcagcacgcaaagcgtcaaaaacagcacgcaaatgttctaaatgctcctctatagacttgctgtaaataaggatatcatcgaaataaacaacaacaaacaaacctatgaaggcccgtagaacttcgttcattaaacgcataaaaggtgctgggagcattagtcaatccaaatggcataaccaaccattcatataaaccaaatttcgttttaaaagccgttttccattcatcaccgagtttcattctaatctgatggtaaccgctacgcaaatcaaccttagagaaaataacggcaccactaagctcatctagcatatcatcaaggcgtggaataggatatcgataacgaactgtgatgttattaatagcacgacaatctacgcacatacgccatgacccatctttctttgggacgagtaaaacaggaaccgagcaagggctaagagactcacgaatgtaacccttatcaagcagcgtctgcacctggcgctggatctccttcgtctcatctggatttgtacggtacggggcgcggttcggaagagaagcgccagggatgagatcgatctgatgctcaatgccacggaggggaggaagacccggtggtaagtccgtaggataaacatcagcatactcctgcaaaaggttaacaacagcagggggtatatccaaagacggtgcatcaacaagcggaacaagcattcgcgagcatacaagtgcataacagggcatatgagcttcatggagatcatcaaaatcagcacgtgtagcaagtaaaacaggagagtgcaacttgatttcagatttaataggtgcggctgatgtcgatttgacttgttgtgcagttttagcagccctagtaagatcatctttcaaaatttggtcaggggtcatgggatttataattattttctggcctttaaacatgaaagaataatgatttgaacgaccatgatgtaaactatcagtatcatattgccaaggtcgacctaataacaaagagcatgcttccataggaataacatcgcaatcagcataatcagaataagaacccagcgaaaaggggacacgtaccgaacgtgttacctttattttaccaccatcattaagccattgaatgtgatacggatgtggatgtgtgcgagtgggcaaggataatttctctaccaacgttgtacttgccaaattgttgcagctgccactatcgatgatgatgcgaatcgaccgttcgtgcacgacgcccttggtatggaatagagtgtgtcgctgatttttttcggcctgggcaacctgtgtgctgagaacacgctgcacaacaagactctcatacctatcggcgtcgatgggatcaacgtggacttcctcattttctgcatggttagtggcaatcatagcatgactagtttcctcagaatcactggctgaagagtactcaccattgtcacgtataagcaaggtacgcttgtttgggcagtcccgaatcatgtgcccaaaccctctgcaacgatggcactgaatatcccgtgtacgtcctgtggaagaagcggcgcctttggcagggggcgccactggcttggtcgtccctgtgcgcgatgtagtgctaggcgtagaaggtgcaggactggaaggagttgagctgtgtgttggaccccggcctgcaaaagagttagtatatgtctttgatcgtcgtccctgcacttcacgttcagctttgcaagcatattcaaacaatgtggttatatcaaaataatccttataatcaagtatatcctgaatttccctgttcaaaccaccacgaaaacgcgccatagcagcgtcatctgactcaaccaaaccacaacgaagcatacccttttgcaactcctggtaatattcctcaacagattgtgaaccttgttgaaaacgctgcattttgttaagcaaatcacgagcataataggaaggaacaaatctgtggcgcatggcagtttttaattgggtccaagtaatgacactgttaatgggaagtttttgtttatactcacgccaccaaattaaagcaaaatcagtaaatttcactaatggcagccttcacttggctattagcaggaatatcatggcatgaaaatttctgttctacctctaattcccaatcaagatatgcagcaggatcatatttaccattaaaagatggaattttaaatttaatcttagaaaataagtcattagggggatgacgaaccacacgacgtgcacgaccacggcgatctccatcgtcctgctcagtgtcaccgccgtattcttgctccatctttgtggtcaatgcatcaaggcgtgccaggatggtgtcgagtgtggtgcgagtcgccgtttgagcaaggtcaagttggttgaaacgctcggtcgtcgaagtgatcgttgaatcaagtcgttcatgcatcgtcctaatgtcagcagcaagtccatcaacttgtccccttacttcctgcaactgggcatccaccatgtcgtgtgctcctgccatagttagcgcaaacaccaaaaggagaaaaaccaacgacaaaaacaggggtgtactgctcacaaggcgctcacactagtgctgttatcaagttcttatccgttcttaccaagccacagtggtgaaccgcaatcaacaggtggaaccggtgaaagattggatgagcgattgcgtggagaaacagaaacctgctcgtcgtagaaatatgtggagttgtgggtaggttgcactcaagtcaaggattagcacgatcaaacaataatgcaaagttgaattatagtgcaaaacacgaaactatattgctggccacaggtgcaaaagatggatatgactagtaga

SEQ ID NO: 631 - DNA, 3634 bp, Zea mays
  source: /note="Zea mays BAC clone full insert sequence contig bacm.pk108.h15-2.fis28"
tacaagcactgaacatgtgagccataattcctcttttgcatctgctctacatgttgatcaagaacacaaaataatgaaaccagctgttgtttttccatcatcacaagaagaattgattgctgacacttgtgatagtgaagatttgtgggataatgattcacatgtactaagacaacaactagtaaatgaacatgttacatctattattgaaccaaacattttggctaaaaaggaacatgtaatttgtattgcaaacaaaactgaagaaacaaatttgctctcttctttaaatacttggggctatattgaatttgatgatctttttgagctcggtaatttggaaaatattttatttgctaaatcaactataccatgtccttctcatgatatattttatattgctggcaagtacaacaacataggacaatttcttgtgcatagaatttctatttcatctagatatgttgtttcttcactttgtgcaaataaggtattggtatgttctcaagaagaaaagaatctcttgtttccatgtactttagttgaagtttcaggtttatatttgaaagacattaataaaagcttagtcatcaacatcaatcatgatgcaaaaccgaggacggtttgctatcaagaaggggagaatgatgagaacataacccacacagatatgaccatgttaatggctcctgctacaaagacattgaggaacaaagaagttgactggggaccaagtaatgatatttccaacatttccaacaaagcaagcacatcatcaaatttaaagatatacttgggtgaggagcatacactagagtcgaggacgactctattacaagaaggggaggatgatgaggacatcactgccatcaatacaccacaccagcgacctccttcaccatttaataatggaccagtgaaacgagtccgtgcacgtaaatttaattatcaggtgaactcgttccttgttgttgaagctaatcgttccttaaatgaggtactaataccttgtgattactttattattctaaggtgtttgggaggtgaaccatctagaatttgagaaggcaacaaggcaataaaagctgctccacttgaggggatttcgaaactacaacaagtgcaagtttaagagggcatatctttcagctcccaaggttgtttaatgcaaataagcacttgttggaaaggtctctttgtctactttctagtggatcaagaatcaacgagagatcagacactaagtgtccagaaactgccgagttaactcctgctctacccaagtcaatttcgtaactgcagcatgcaccaagttaaatggagcataactttccactcccaaggttgtttagtgcaaataactacttgttggaaagctctcttcgtctactttcatttgcatcaagaatcaatgacagcaaccaaacgaggcgtccagaaactgccgagagagtttcgttctccattagaactcctttctattcctctatttaagcaactagcagccaccaaagaacttgggtttttgtttgatgtaagtttagcctttgctacttccttgtaaacgcgtgtgtcggctagaccacccggatacttgaaacagaaccccaactctatcagatccgtgagcgtctgctttttatcttgttcttgcttgttctcgattgcttgcaggttcaaggctgttcttggcacggcaagagcagcaacaacaggagccggtgtaactatcgctaaggcgcagcacccttgtggttattgtagtcggatagcacaacgtcgacctccaccccaaatcgtagttatcaggagacagtgtacctgtcgctcaaggcgccacaccatcttggttgtggtagtcgggcagccaacgtcgttctccaacaagtttttcacctccatcatctctcatcaaaagatcgggcacccttctacccgttgggtttatcaagtggtatcaaatttcaggttgctcggtgagagaactcaatctttctttgttttatttacctacagtccacttttgcccaaagatatatttagatcagaaattcacctaaaaacagtttgagcctttgctttactatttagttttcgacttgttgaattcacggttgctgcatttgggtcgagttgctggtctaaagttttcttaccgctagagtttcgagttcgcgccaccttgtttcaatcaccagtttagacctcttgctgcaattcaaccaaaaagaagagaaagcaaaaggcgagtgcataaaaaaagccgcactaatcagcaaaacaaaaaaaagacacgtgcaaaaaaagagagagaaaaaccagttctgaattttggtagataaaatttgtaagtgcaacaaaacaaaaggcagtttgtgtgccttctttttatagtttcagaaatcagattgttgttctgagcttttggtgatactatttgtgtaacggctcgcgtctctattacggtttggactaggaccagcacaacaccattgtggaacgtttattcaacttgttgtggctaacgtggtactagctattccttggaactattgtttgaacagccacctataaatccacaaaattttctacaacaccaccaggttgtgctagcagccactgttgttgttgttcgtgctgtttgccagcgcctcctgctttgcgtggtgagaacttgtaagaacttgtttaaccagtttgagagtgagagattacaacaatgattcctagtagtttatagaatcaaagatattttttattgtttcttgtctttactaaacatggcaggtgatatggacatttttgacccaaccgaacgttatattggaggcatcattcaacacttgcctttatatgccggtaaattcgatcctcatgcatacattgattgggagctaaaggtagataaggaatttgataagcatgatctatctcaaaaacaaaagatttatattgcctctaatttgttaactgagcacgcattgatggaatggaaatacatttgtaggcacaacaaagttccacaatcttgggaagacttcaaacttcattttagagatgcattcattcctgcatactatgctgatcatttgctttctaaattagacaccttaaagcagggttctaggactatgaaagattattattatgattttaaaatttgtaccatgtttgctcgtttagatgaatgcatggaagatgtcatgactaggttcatgaaaggactcaattctgaaattcagactatagtcatgcatgaagcatacaaacacatttctcacttgtttttgcttgcatgtaaagctgaaaatgagattctattatacaattatacaagcactgaacatgtgagccataattcctcttttgcatctgctctacatgttgatcaagaacacaaaataatgaaaccagctgttgtttttccatcatcacaagaagaattgattgctgacacttgtgatagtgaagatttgtgggataatgattcacatgtactaagacaacaactagtaaatgaacatgttacatctattattgaaccaaacattttggctaaaaaggaacatgtaatttgtattgcaaacaaaactgaagaaacaaatttgctctcttctttaaatacttggggcta

SEQ ID NO: 632 - DNA, 3834 bp, Zea mays
  source: /note="Zea mays BAC clone full insert sequence contig bacm.pk108.h15-2.fis29"
caagccaaggagaagaagggacatgcaaaggcatatacaaaccatggttgttcaaccgtgacttagctttctgacaagtagtgcagcgtgcaacaaggcgctcaacatcagcgcgcatccgaggccaaaataagtgggcagccaacacctcatgtgttttgtagacgccaaaatgccccatgagaccgcctccatgtgcctcctgtaacaacaaaagacgaaccgaactagctggaacacacagcttattagcgcgaaacaggaacccatcctgtatgtgaaatttgccccatggtatcccattaatacaatggccgaaagcatctttaaaatcagcatcgtcaacatattgatccttcagagtgtccaaaccaaagattttaaaatctaattgtgacagcatggtatagcgacgagacaaagcatcagcaataacattgtccttcccgttcttgtgtttaataatgtaaggaaaggactcaatgaattcgacccatttagcatgacgacggttcagatttgtttgggtacgaatatgttttaaagcctcatgatcagaatgaattatgaactcacgatgccaaagatagtgctgccatgtatgcaaagtgcgcactaaagcgtaaagctccttatcataagtagaatatttcagactagcaccgcttaatttttcactaaaataagcaactggttttccttcttgtaacaaaacagcacctagcccaataccgctagcatcgcattcaagctcaaaaactttattaaaatcaggcaattgcaagaggggagcttgggttaacttatctttcaaagtgctgaacgctacctcctgcgaatcactccaagcaaacggcacatctttctttgtaagctcatgtagaggcgctgcaatggagctaaaatcacgaacaaatctgcggtagaaaccggcaagtccaagaaagctccgaatctgtgtgaccgtcgtcggtgtaggccactcccgaatggcagcaatcttgctgctatccacctcaatgccctgcggagtaaccacataaccaagaaacgagacacgttgcgtgcaaaatgtgcacttttccatgttaccaaacaagcgagcagcacgcaaagcatcaaaaacagcacgcaaatgttctaaatgctcctctatagacttgctgtaaataaggatatcatcgaaataaacaacaacaaacaaacctatgaaggcccatagaacttcgttcattaaacgcataaaggtgctgggagcattagtcaatccaaatggcataaccaaccattcatataaaccaaatttcgttttaaaagccgttttccattcatcaccgagtttcattctaatctgatggtaaccgctacgcaaatcaaccttagagaaaataacggcaccactaagctcatctaacatatcatcaaggcgtggaataggatatcgataacgaactgtgatgttattaatagcacgacaatctacgcacatacaccatgacccatcttactttggaacgagtaaaacaggaaccgagcaagggctaagagactcacgaatgtaatccttatcaagcagcgtctgcacctggtgctggatctccttcgtctcctctggatttgtacggtacggggcgcggttcggaagagaagcgccggggatgagatcgatctgatgctcaatgccacggaggggaggaagacccggtggtaagtccgtaggataaacatcagcatactcctgcaaaaggttaacaacagcagggggtatatccaaagacggtgcatcatcaagcggaacaagcatgcgcgagcatacaagtgcataacagggcatatgagcttcatggagatcatcaaaatcatccacactactgatgcatctataccaatacaagtaccaatttctggtcccattactcgcgctcgtgctcgtcaactcaaccatcaggtgattacactcttgagttcatgtccatcatatttagaccatggagacccgtgcactcttgttttgcttaggaatcagggagaagactgaaagggaaaaggatttgaacatgctggattcggactacagaagaacaccaacttgtgacggtcaccacggtcagatgcgggctcggattggaatgttcaagcacaacatggaaagcttatcaagtctactttcatatggatccggaattatagtcatatctgttctgaggccgccgtaatcattgttttcttaccgagacatttcctgccttttctgcccatggtgctgcgtcaccctattttggcccaatgggtcgtgtatcaagttaggtccattagggacgcatcctagggttgcagcacgaccccaatacccttgtggtcgtcctcccatgtttataaaccccctagccgccaccaagaacggcgggttttgtttagatcaagtttagctctcgctacttgcttgtaagcgcgcgtgctagtcagccgcccgtcttcttgtcttcggaaccccaccatattgtagtttgatctttaaacctacatttagatctggtaattcagtacttgttctacttgttcttgctagttcttcgattgcttgcaggacgagtgccctagtggccagggtgtcacgctccacaagatcgtgacagccataggaggtggtgtatcggttgctaaggcgcagcgtctttggaaggctgtagtcgggccgtgaacgtcgtctcctcccccaatcgagttattccacaccctctcatcgaaagatcgggcaatcacccaacgggtgcacatcagttggtaatcagagcaaggtttatcggtgagagatttacttttcttcgctgttttcttatctcctatagtccagaaaaagccaaaaaatagtagattagttttaccgcaatcctataaaccattgagcatttactagtactacttagttagggcttgttgagtttttggttgcatcggttgtgtcgagttgctggtcttagtttattcctttagagttttgagttctaccacgttttggtcaccacgagatccaccatcaccaaaaacatctctggttcgtttttgccaccacggatacatatcatatccgatttggaagtttaaatacaatctggaaagcttatcttatcttctttccaacggatctgaccttatctcaaaattcgttctgagcgctccgcaatcatcgtagagatttctggactttctatattaacaagatttgttaaatctgatttaaaggggctgttagcaatatctttattgtttgggttgtcatagtgaaaaaagggtttaagcccctgcaaaaaaaaaaacagaagaagaagaagaaaaaaaaagaatagaaaaaaaaggaaaagaagaagaagggggctgaatctctaaatctgttgtttctctttgtgctgtgctagttgttctttttcagtgactacctttgtgcctaggctcacgtctctaacctggtttagcctaggaccagcacagtaccaccgttgaacgattattcagcttgcttttgtaactaacgtggtactagtgtattccttgcttcagcccacctacaactctacatatttcgactacagtttgacaggtcgtgttgctgcggcaccgatacacttattccacggttgcagacttgttggttgctgacccctcctgttgtgcaaggtaagaattggtaagagcttgtgtggcaggttgagagtgagcgccttgcagtagctacatcctaatagttgtagagtttttattccttcacgtttttttttcttgttgcctctgttcgtctaaccatggcaggattggaggttgatgatgcttctcgta

SEQ ID NO: 633 - DNA, 4161 bp, Zea mays
  source: /note="Zea mays BAC clone full insert sequence contig bacm.pk108.h15-2.fis30"
taataatgtaggaaaaagactcaatgaattcgacccatttagcatgacgacggttcagatttgtttgggtacgaatatgttttaaagcctcatgatcagaatgaattatgaactcacgatgccaaagatagtgctgccatgtatgtaaagtgcgcactaacgcgtaaagctccttatcataagtagaatatttcagactagcaccgcttaatttttcactaaaataagcaactggttttccttcttgtaataaaacagcacctagcccaataccgctagcatcgcattcaagctcaaatactgtattaaaatcaggcaattgcaataggggagcttgggttaacttatctttcaaagtgctgaacgcttcctcctgcgaatcactccaagcaaatggcacatctttctttgtaagctcatgtagaggcgctgcaatggagctaaaatcacgaacaaatctgcggtagaaaccggcaagtccaagaaagctccgaatttgtgtgaccgtcgtcggtgtaggccactcccgaatggcagcaatcttgctgctatccacctcaatgccctgtggagtaacaacataaccaagaaacgagacacgtcgtgtgcaaaagatgcatttttccatgttagcgaataactgggcggcacgcaatgcatcaaaaacagcacttaaatgttccaaatgctctttcttagatttgctgtaaataaggatatcatcgaaataaacaaccacaaacaatcctatgaagggcctcagaacttcattcatcactcgcataaaagtgctgggagcattagtcaatccaaacggcataaccaaccattcatataaaccaaatttcgttttgaaggctgttttccattcatcacccagtttcattctaatctggtggtaaccactacgtaaaaataatggcaccactaagctcatctagcatatcatcaaggcgtggtataggatagcgataacgaatagtgatattattaatagcacgacagtctacacacatacgccatgacccatccttcttgggaacaagtaacacaggaacagagcaagggctaagagactcacgaatgtatcctttgtcaagcaacgcctgtacctggcgctgaatctccttcgtctcatccggatttgtacggtatggtgcgcggtttggaagctgtgcaccgggaatgaggtcgatctggtgctcaatgccacgaagcggtgggagacccggtggtaagtctttgggaaagacatcagcgtactcctgcaaaaggttagcaaccatagggggaatagccaaagatggtgcatcatcaagtgaaatgaggacactagagcatacaagtgcatagcatggcaaatgagcaccgtgtagatcatcaaaatcagcacgtgtagcaagtaaaacaggagccttcaacttaatttcagaaggaacagagggcgatggatcaagttgtttagcagttatagcagctcgggcaagatcatctttaacaatttgttcaggtgtcattggatgtataattattttctgacccttaaaaatgaaagaataatgattcgaacgaccatgatgcaagctatcagtatcatattgccaaggtcgaccaagtaacaaagagcatgcttccatgggaataacatcacaattaacaaaatcagaataagcacccatggagaaaggaacacgcacggaacgcgtgatttttattttaccaccatcattaagccattggatgtgatatgggtttggatgcttacgagtgggtaacgacaacttttcgaccagcatggtactcgccaaattgttgcaactgccgctgtcgataatgatgcgaattgaccgctcctgcacaacaccctttgtatggaacagagtgtgtcgctgattcttctcgggcaaagcaacctgtgtactaagaacacgctgcacaacaagactttcatacctatcagcgtcgctcgggttgacatgtacctccgcctgagctgcatggttagtggcaagtagtgcatgttcaatttctttagaatcactagcggaagagtactcaccatcgtcacgaatgagcaaagtgcgcttgtttgggcagtctcgaatcacatggccaaatcctctacagcgatgacactgaatatcccgtgtacgacctgtgggtggggtagtgctggctggtttggtcgtcttctcgcgtggagtagtggtggacgtggatggcgcagggggaactggtgctgaggtggatgtcgagcttcgtcctgcaaaagggttagaatatgtcttcgagcggcgtccctgcacttcacgttcagctttgcaagcatattcaaataaagtagtcatatcataatattccttataatcaagtatatcttggatttcgcggtttaaactgtaacaccccaggtgttgccatggctggagcacaccttggcactcaagactatgatcacatgtggaagaacttaaggagcaaaagtataaggggctttggaaactaagtttttaccaagagttgggaatgaccaaaggcattaccctaattgtgtgcaactatcaccttgggagagggggaaagaaccctaggcctctcttaaaccctatctcccaaaaccatggataagaggggaaagagagtgagcaaatgtgcaaaacatgggtaattttcacccaaaccctaagcaacattataaccatcaattaggggagggaaatattacaaaaaggcccctagggaaaccccatttcaaatctccaagtggagagagagctagagctctctaattccctctaagtcccattttagcaacaagatgtatcatgatctcagatgcaccctggatgttcccaaggaccctgagcttagaaagaagatactggacgaagctcacctttccaaattctccatgcaccctggtagcaacaagatgtatcatgatctcagatctctatattggtggactagaatgaaaagggaaattgccaaatacatatccgaatgtgacacctgccagagaattaaggctagtcacttgaaggcagcaggccatttgcaaccccttcccataccatcttggaaatgggaggacatttgcatggacttcatagtgggattacccaatacctccaggcaccatgattctatttgggttatcgtggacagattgaccaagactgctcatttcttgcccgtgcacaccacccacaagaccgagaagtatgctgagatttatgttgatcagatagtgagattgcatggtattcccaagaccattatatctgacagaggagcactgtttgtggcacgcttttgggagaaactgcaagaatcacttgggacccatgtcatccgaagctcagcataccacccacaaacagatggccagatagaaagggtgaatcaaattttggaagatatgttgcgagcctgtgcactacattatggaaaggaatgggacaagtgtctgtctttggcagagttctcttacaacaatagctatcagtccagtctgaagatggcaccttttgaggcattgtatgggagaaggtgtaggaccccactgaattggtctcaagcaggagaaagggaaatttttgggccagacttagtactcgaggcagaggcaaaggtcagggtcattaccaagaacttggaagctgctcaggctaggcaaaggagctatcatgataagaggcggaaacctctacagtttgaggtgggagatcatgtctatcttaaggtatcccccaccaagggtgttcagagattcgggatcaagggcaagttagcccctcgctacattggaccctatgagatcaaggcaagttgtggacccgtagcttaccaattggaattgccacctcacatgtcagcagtgcataatgtgttccatgtatctcagctacggaaatgtgttcgtctacccactgaagtactcccggaaccagacattgagatagaaccagatttatcctaccaagagtaccccgtcaaggtattagatcaaaaggagagatcaactcgggcaaggacagtaagaatgtatatgttcagtggagtcaccattcaacagaagaagctacatgggagactgaggattttctacgctctcgcttccccgactttctacccaaagagtcggtatgtaaccacagg

SEQ ID NO: 634 - DNA, 5979 bp, Zea mays
  source: /note="Zea mays BAC clone full insert sequence contig bacm.pk108.h15-2.fis31"
ctcgtttggttgctgtcattgattcttgatgcaaatgaaagtagacgaagagagctttccaacaagtagttatttgcactaaacaaccttgggagtggaaagttatgctccatttaacttggtgcatgctgcagttacgaaattgacttgggtagagcaggagttaactcggcagtttctggacacttagtgtctgatctctcgttgattcttgatccactagaaagtagacaaagagacctttccaacaagtgcttatttgcattaaacaaccttgggagctgaaagatatgccctcttaaacttgcacttgttgtagtttcgaaatcccctcaagtggagcagcttttattgccttgttgccttctcaaattctagatggttcacctcccaaacaccttagaataataaagtaatcacaaggtattagtacctcatttaaggaacgattagcttcaacaacaaggaacgagttcacctgataattaaatttacgtgcacggactcgtttcactggtccattattaaatggtgaaggaggtcgctggtgtggtgtattgatggcagtgatgtcctcatcaggagggatagcatttttgtggttgttgatcgattctccaaaatggctcatttcatactttgtcataagaccgatgatgctagcaatgttgctgaattgtttttagagagattattcgtttgcacggtattcccaatacaatagtctcggatcgtgatgctaagtttcttagtcatttttggagatctctgtggaataaattgggaactaaattgctgtttagcaccacttgtcaccctcagactgatggtcaaactgaggtagttaatcaaactttgtctaccatgcttagggctgttttagacaaaaatttgaaacgttgggaggattgcttgcctcatgttgagtttgcttataatcatgcaacacattcttctacaaagatgtgcccttttcaaattgtttatggttacattcctagggcgcctattgctttgttttcgcttgatgctgcggacgccccacacatagatgctattgcacatgttgaacaaatgattaacctccatgaacaaactcaacaaaacattgctgctactaatgcaaaaaatcaggttgctggtagtaaaggaagaaaacttgttacttttgagccaggtgatatggtttggttgcacttgagaaaggatcagtttcctactttgcgccgttctaaattaatgcctcgtgctgctggtcctattaaggtgctaacaaagattaataataatgcttatatccttgacctgcctgcggaatttggtgtttccactagttttaatgttgcagatttgaaaccatatatggccgaggatgaggagttgccgtcgaggacgacttcacttcaagaaggagaggatgatgaggacatcactatgagtacgactacaccagcagcacctccacatcaagcgccacttccttcattagctgggccaatcactcgggcccgtgccagagatcttaacttcgtcatgctactgaagaatgaaggtccagaagaatagacgaccagcccaactgcggcccatagtggacgacctagggttggccgcccctaggggctgtgccccctctctctatttatataggagttgcgcctcctttgttttttcgagttttgttttacatctagctttagctaccccagaacacgcacaaatacgtgttgtcctctgtgattcagaactccacctcgagtgatattaagattgctcgcatctttttcttgttcgttcttcgattgcgcacaggaaaggatcttcgtgatcaggccgatctcgcatcagcaaggtcggtaaccattggaagttggttcagcgattgcattggcgcttcgggatcgctcgtcgtagtcggatcgtgagggtctacttccaccaaatcggaattatctccactcaccgaaagatcgggcactccagttctatcacattgccgcacgtcacccattccgaaaacgggtgtcgaagtgcatacaataacgaatttttgccaccggaaccatttcttcgtttttcgcaacgaacatgcccaatccactactttaggtccaaaacacatgtttggagtggtttcgcgcaatttcattgccgcacgtcacccattccgaaaacgggtgtcggggtgcatacaagcacgagtttttgccaccggaaccatttcttcgtttttcgcaactaacacgtccaatccactactttaggtccaaaactcatgtttggggtggtttcgcgcaatttcgttgccgcacgtcactcattccgaaaatgggtgtcagagtgcatacaaagcacgagtttttgccaccggaaccatattttcgtttttcccaatgaacatgcccaatccactactttaagtccaaaacgcatgtttggggtggtttcgcgcgatttcattgccgcacgtcatccattccgaaaacgggtgtcggggtgcatacaagcacgagtttttgccaccggaaccatttcttcgttttttgcaacgaacatgccgaatccactactttaggtccaaaactcatatttgaggtggtttcgcgcaatttcattgcggcacgtcactcattccgaaaatgggtgtcgaggtgcatacaagcacgagtttttgccaccggaaccatttcttcatttttcgcaacgaacatgcccaatccactactttaggtccaaaactcatgtttggggtggtttcacgcaatttcattgccgcacgtcactcattccgaaaataggtgtcgaggtgcatacaagcaagagtttttgccaccggaactatttcttcgtttttcgcaaccaacatgcccaatccactactttaggtccaaaactcatatttggggtggtttcgcgtaatttcattgccgcacgtcacccattccaaaaacgggtgtcgaggttcatacaagcacgagtttttgccaccggaaccatttcttcgttttttgcaacgaacatgcccaatccactactttagttccaaaactcatatttggggtggtttcgcgcaatttcattgccgcacgtcactcattccgaaaacgggtgtcgaggtgcatacaagcaagagtttttgccaccggaaccatttcttcgtttttcgcaaccaacatgcccaatccactactttaggtccaaaactcatgtttggggtggtttcgcgcaatttcattgccgcacgtcacccattccgaaaacgggtgtcggggtgcatacaagcacgagtttttgccaccggaaccatttcttcgttttttcccaaccaacatgcccaatccactactttaggtccaaaacccaggtttggggtggtttcccccaatttctttgacccacgtcacccattccaaaaatgggtgtcggagtgcatacaaaccaaaattttttcccccgaaaacattattttcttttttccaaaaaaatatgccaaacccactactttaggtccaaaactcatgtttggggtggtttcacgcgatttcattgccgcatgtcacccattccgaaaacgggtgtcggggtgcatacaagcacgagtttttgccaccggaaccatttcttcgtttttcgcaacgaacatgccctccactactttaggtccaaaactcatgtttggggtggtttcgcgcaatttcattgccgcacgtcacccattccaaaaacgggagtcgaggtgcatacaaagcacgagtttttgccaccggaaccatttcttcgttttttgcaacgaacatgcccaaaccactactttaggtccaaaactcatgtttggggtggtttcgcgcaatttcgttgccgcacgtcactcattcagaaaacgggtgtcggggtgcatacaaagcacgagtttttgccaccggaaccatttcttcgttttcccatcgaacatgcgcaatccactactttaggtccaaaacacatgtttggggtcatttcacacaatttcgttgccgcacgtcacccattccgaaaacgggtgtcggggtgcatagaagcacgagtttttgccacgggaaccatttcttcgtttttcgcaacgaacatgcccaatccactactttaggtccaaaacacatgtttggagtggtttcgtgcaatttcattgccgcacgtcacccgttccgaaaacgggtgtcggggtgcatacaaagcacgagtttttgccaccggaaccatttctttgtttttcacaacgaacatgcccaatccactactttagatccaaaacacatgtttggggtggtttcacgcaatttcgttgccgcacgtcacccattccgaagacgggtgtcgggggtgcatacaagcacgagtttttgccaccggaaccatttcttcgtttttcgcaatgaacatgcccaatccactactttaggtccaaaactcatgtttggggtggtttcgcgcaatttcgttgccgcacgtcactcattccgaaaacgggtgtcggggtgcatacaaagcacgagtttttgccaccggaaccatattttcgtttttttcccaacgaacatgcccaatccactactttaggtccaaaacgcttgtttggggtggtttcacacaatttcgttgcagcacgtcacccattctgaaaacaggtgtcggggtgcatacaagcaccagtttttgccaccggaaccatttcttcgtttttcgcaacgaacatgccgaatccactattttaggtccaaaacacatgtttgggttggtttcgcgcaattttattgccgcacgtaaccaattccgaaaacgggtgtcgggttgcatacaagcacgagtttttgccaccggaaccatttcttcgtttttcgcaacgaacatgcccaatccactactttaggtccaaaacacatgtttggggtagtttcgcgcgatttcattcccgcacgtcacccattccgaaaacgggtgtcggggtgcatacaagcacgagtttttgccaccggaaccatttcttcgtttttcgcaacgaacatgcccaatccactactttaggtccaaaactcatgtttgcggtggtttcgcgcaatttcattgccgtacgtgacccattccgaaaacgggtgtcgggtgcatacaagcacgagtttttgccaccggaaacatttcttcgtttttcgcaacgaacatgccgaatccactactttaggtccaaaacacatgttttgggtggtgtcgcacaattttattgcagcggtttcgcgtgatttcattgtcgcacgtcacccattccgaaaacgggtgtctgggtgcatacaagcacgagtttttgccaccggaaccatttcttcgtttttcgcaacgaacataaccaatccactactgtaggtccaaaacacatgtttggggtggtttcgcgcaatttcattgccgcacgtcacgcataccgaaaatgggtgtcggggtgcatacaaagcacgagtttttgtcactggaaacatttccttcgtttttcgcaacgaacatgcccaatccactactttaggtccaaaacacatgtttggggtggtttcgcgcaatttcattgccgcacgtcacccattccgaaaacgggtgtcggggtgcatacaagcacgagtttttgccaccggaaccatttcttcgtttttcgcaacgaacatgcccaatccactactttaggtccaaaacacatgtttggagtggtttcgcgcaatttcaatgccgcacgtcacccattccgaaaacgggtgtcggggtgcatacaaagcacgagtttttgccaccggaaccacaagaaggaaaaccagttgcttattttagtgaaaaattaagcggtgctagtctgaaatattctacttatgataaggagctttacgctttagtgcgcactttgcatacatggcagcactatctttggcatcacgagttcataattcattctgatcatgaggc

SEQ ID NO: 635 - DNA, 3051 bp, Zea mays
  source: /note="Zea mays BAC clone full insert sequence contig bacm.pk108.h15-2.fis32"
ggtggtttcgctcaatttcgttgccacacgtcccccattccgaaaacgggtgtcggggtgcatacaagcacgagtttttgccaccggaaccatttcatcgtttttcgcaatgaacatggccaatccactactttaggtccaaaactcatgtttggggtggtttcgcgcaatttcgttgccgcacgtcactcattccgaaaacgggtgtcggggtgcatacaaagcaggagtttttgccaccggaaccatttcttagtttttcccaacgaacatgcccaatccactactttaggtccaaaacacatgtttggggggggtggtttcccactattttgttgccgcacgtcacctttaaaaaaaggggtggggggttgcatacaaagcatgagttttttccaccggaactatttcttcgtatttcgcaacgaacatgcgcaatccactactttaggtccaaaactcatgtttggggtggtttcgcgcaatttcattgtcgcacgtcacccattccgaaaacgggtgtcgggggtgcatacaaagcacgagtttttgccaacggaaccatttcttcgtttttcgcaacgaacatgcccaatccactactttaggtccaaaactcatgtttggggtggtttcgcgcaatttcattgccgcacgtcactcattccgaaaacgggtgtcggggtgcatacaaagcacgagtttttgccaccggaaccatttcttcgtttttcgcaacgaacatgcccaatccactattttaggtccaaaacacctgtttgcgttggtttcgcgcaattttattgccgcacgtcacccattccgaaaacgggtgtcggggtgcatacaagcacgagtttttgccaccggaaccatttcttcatttttcgcaacgaacatgcccaatccactactttaggtccaaaacacatgtttggagtggtttcgcacaatttcattatcgcacgtcacccattccgaaaatgggtgtcggggtgcatacaaatcacgagtttttgccaccggaaccatttcttcgtttttcataacaaacatgcccaatccactactttaggtccaaaacacatgtttggggtggtttcgcgcaatttcattgccgcacgtcacccattccgaaaacgggtgtcggggtgcatacaagcacgagtttttgccaccggaaccatttcttcgtttttcgcaacgaacatgcccaatccactactttaggtccaaaacacatgtttggagtggtttcgcgcaatttcaatgccgcacgtcacccattccgaaaacgggtgtcggggtgcatacaaagcacgagtttttgccaccggaaccacaagaaggaaaaccagttgcttattttagtgaaaaattaagcggtgctagtctgaaatattctacttatgataaggagctttacgctttagtgcgcactttgcatacatggcagcactatctttggcatcacgagttcataattcattctgatcatgaggctttaaaacatattcgtacccaaacaaatctgaaccgtcgtcatgctaaatgggtagaattcattgagtcttttccttacattattaaacacaaaaacgggaaggacaatgttattgctgatgctttgtctcgttgctataccatgctgtcacatttcgattttaaaatctttggtgtgcacactgtgaaagatcaatatgttgacgatgctgattttaaagatgctttcggtcattgtattaatgggaaaccatggggcaaatttcacatacaggatgggttcctgtttcgcgctaacaagctgtgtgttccagctagctcggttcgtcttttgttgttacaggaagcgcatggaggcggtctcatggggcactttggcgtctacaagacacatgaggtgttggctgcccacttcttttggcctcggatgcgcgctgatgttgagcgccttgttgcacgctgcactacttgtcagaaagctaagtcacggttgaacaaccatggtttgtatatgcctttgcctgttcctacttccccttggattgatatttcgatggattttgttttgggattgcctagaactaagaaggggaggtgataaacccaacgggtagaagggtgcccgatctttcgatgagagatgatggaggtgaaaaatttgttggagaacgacgttggctgcccgactaccacaaccaagatggtgtggcgccttgagcgacaggtacaccgtctcctgataactacgatttggggtggaggtcgacgttgtgctatccgactacaataaccacaagggtgttgcgccttagcgatagttacaccggctcctgttgttgctgctcttgccgtgccaagaacagccttgaacctgcaagcaatcgagaacaagcaagaacaagataaaaagcagacgctcacggatctgatagagttggggttctgtttcaagtatccgggtggtctagccgacacacgcgtttacaaggaagtagcaaaggctaaacttacatcaaacaaaaacccaagttctttggtggctgctagttgcttaaatagaggaatagaaaggagttctaatggagaacgaaactctctcggcagtttctggacgcctcgtttggttgctgtcattgattcttgatgcaaatgaaagtagacgaagagagctttccaacaagtagttatttgcactaaacaaccttgggagtggaaagttatgctccatttaacttggtgcatgctgcagttacgaaattgacttgggtagagcaggagttaactcggcagtttctggacacttagtgtctgatctctcgttgattcttgatccactagaaagtagacaaagagacctttccaacaagtgcttatttacattaaacaaccttgggagctgaaagatatgccctcttaaacttgcacttgttgtagtttcgaaatcccctcaagtggagcagcttttattgccttgttgccttctcaaattctagatggttcacctcccaaacaccttagaataataaagtaatcacaaggtattagtcc

SEQ ID NO: 636 - DNA, 4801 bp, Zea mays
  source: /note="Zea mays BAC clone full insert sequence contig bacm.pk108.h15-2.fis33"
gacgttaccctagatggagacgaagggagctttccaacaagtatttatatgcattaaacggccttggaagtttgaagatatgccccatttaaacttgtacttggtgctgttacgaaatcctttcgggtgcagcagcctttattgtcttgttgccttctccagtccaagatggttcacctcccaaacacttgagcataataaagtcatcgcaaggctttagtacctcatttaaagaagaattagcttcaatagcaaggaacgagtttatctgataattaagtttacgtgcacaggctcgtgtcattggtccttgattagctacgaatggtgaagtggtcactggtatggttgtatcaatgatagtgatgtcctcatcatcctccccttcttgcaacaaagtcgtcctcgactcaaacgtgtcattctctcccaagtatggtgttaaatctgcaatattaaaagaggaactgaccccaaaatctgcaggcaactgaactttatatgcattatcattatttttgtgaagtactttgatgggtctagcagctcttggttgtaatttagatttgcgcatatcagggaatctatctgatgtagctgaggtgcccgatcttttggcgagtagagataattccgatttggcggaagatgacccttgcgatccgactacgacgagcaagcccgaggcgccaatgcaatcgctgaaccaactctctgtggttaccgaccttgctgatgcgagatcgacctgatcacgaagatcgtttcctgtgcgcaatcgaagaacgaacaagaaaaatatgcgagcaatctaatctattactcgagggtggagttctgaatacacgaagacaacgcagatttgcacgtgttcgagagtagctaaggctaacgtaaaacaaaactcgaaaataaaggaggcgcagctcctggataaatagagggggcgcagcccctaggggcggccaaccctaggtcgtccactatgggccgcagttgggctggtcgtctattcttctgggccctcattcttcagtagcatgacgaagttaagatctctggcacgggcccgagtgattggcccagcttatgaaggaagtggcgcttgatgtggaggtgctgctggtgtagtcgtactcatagtgatgtcctcatcatcctccccttcttgaagtgaagtcgtcctcgacgacaactcctcatcctcggccatataaggtttcaaatctgcaacattaaaactagtggaaacaccaaattccgcaggcaggtcaaggatataagcattatcattaatctttgttagcaccttaaaaggaccagcagcacgaggccttaatttagaacggcgcaaagtaggaaaccgatcctttctcaagtgcaaccgaaccatatcacctggctcaaaagtaacatgttttcttcctttactaccagcaacctgattttttgcattagtagcagcaatgttctgtttcgtttgttcatgtatggtaatcatttgttcaacatgtgcagcagcatctacatgtggggcgttcgcagcattaagtgaaatcaaatcaataggtgccctagggatgtaacaataaacaatctgtaaagggcacatctttgtagaagaatgcgtggcatgattgtaagcaaattcaacatgaggcaagcaatcctcccaacgtctcaaattcttgtctaaaacagccctaagcatggtagataaagttctatttactacctcagtttgtccatcagtctgaggatgacaagtagtgctaaacaacaatttagttcccaatttattccaaagagatctccaaaaatggcttagaaacttagcatcgcgatcagagactattgtttttggaataccatgtaaacgaataatttctctaaagaacaattcaacaacaatgctagcatcatcagttttatgacaaggtataaagtgagccattttagagaatctatcaacaaccacaaaaatactatccctccccttcttagttctaggcaagcccaaaacaaagtccatagagatatcaagccaaggagaagaagggacaggcaaaggcatatacaaaccatggttgttcaaccgtgacttagctttctgacaagtagtgcagcgtgcaacaaggcgctcaacatcagcgcgcatccgaggccaaaagaagtgggcagccaacacctcatgcgttttgtagacgccaaaatgccccatgagaccgcctccatgcgcctcctgtaacaacaaaagacgaaccgaactagctggaacacacagcttgttagcgcgaaacaggaacccatcctgtatgtgaaatttgccccatggtatcccattaatacaatggccgaaagcatctttaaaatcagcatcgtcaacatattgatccttcacagtgtccaaaccaaagattttaaaatctaattgtgacagcatggtatagcgacgagacaaagcatcagcaataacattgtccttcccgttcttgtgtttaataatgtaaggaaaggactcaatgaattcgacccatttagcatgacgacggttcagatttgtttgggtacgaatatgttttaaagcctcatgatcagaatgaattatgaactcacgatgccaaagatagtgctgccatgtatgcaaagtgcgcactaaagcgtaaagctccttatcataagtagaatatttcagactagcaccgcttaatttttcactaaaataagcaactggttttccttcttgtaacaaaacagcacctagcccaataccgctagcatcgcattcaagctcaaaaactttattaaaatcaggcaattgcaagaggggagcttgggttaacttatctttcaaagtggtgaacgctacctcctgcgaatcactccaagcaaacggcacatctttctttgtaagctcatgtagaggcgctgcaatggagctaaaatcacgaacaaatctgcggtagaaaccagcaagtccaagaaagctccgaatttgtgtgaccgtcgtcggtgtaggccactctcgaatggcagcaatcttgctgctatccacctcaatgccctgtggagtaaccacataaccaagaaacgagacacgttgcgtgcaaaatgtgcacttttccatgttaccaaacaagcgagcaaatgttctaaatgctcctctatagacttgctgtaaataaggatatcatcgaaataaacaacaacaaacaaacctatgaaggcccgtagaacttcgttcattaaacgcataaaggtgctgggagcattagtcaatccaaatggcataaccaaccattcatataaaccaaatttcgttttaaaagccgttttccattcatcaccgagtttcattctaatctgatggtaaccgctacgcaaatcaaccttagagaaaataacggcaccactaagctcatctaacatatcatcaaggcgtggaataggatatcgataacgaactgtgatgttattaatagcacgacaatctacgcacatacgccatgacccatctttctttggaacgagtaaaacaggaaccgagcaagggctaagagactcacgaatgtaacccttatcaagcagcgtctgcacctggcgctggatctccttcgtctcctctggatttgtacggtacggggcgcggttcggaagagaagcgccggggatgagatcgatctgatgctcaatgccacggaggggaggaagacccggtggtaagtccgtaggataaacatcagcatactcctgcaaaaggttaacaacagcagggggtatatccaaagacggtgcatcatcaagcggaacaagcatgcgcgagcatacaagtgcataacagggcatatgagcttcatggagatcatcaaaatcagcacgtgtagcaagtaaaacatgagagtgcaacttgatttcagatttagtaggtgcggctgatgtcgatttgacttgttgtgcagttttagcagccctagtaagatcatctttcaaaatttggtcaggggtcattggatgtataattattttctggcctttaaacatgaaagaataatgatttgaacgaccatgatgtaaactatcagtatcatattgccaaggtcgacccaataacaaagagcatgcttccataggaataacatcgcaatcagcataatcagaataagaacccagcgaaaaggggacacgtaccgaacgtgttacctttattttaccaccatcattaagccattgaatgtgatacggatgtggatgtgtgcgagtgggcaaggataatttctctaccaacgctgtacttgccaaattgttgcagctgccactatcgatgatgatgcgaatcgaccgttcgtgcacgacgcccttggtatggaatagagtgtgtcgctgatttttttcggcctgggcaacctgtgtgctgagaacacgctgcacaacaagactctcatacctatcggcgtcgatgggatcaacgtggacttcctcatttgctgcatggttagtggcaatcatagcatgactagtttcctcagaatcactagctgaagagtactcaccattgtcacgtataagcaaggtacgcttgtttgggcagtcccgaatcatatgcccaaaccctctgcaacgatggcactgaatatcccatgtacgtcctgtggaagaagcggcgcctttggcagggggtgccactggcttggtcgtccctgtgcgcgatgtagtgctaggcgtagaaggtacagggctggaaggagttgagctgtgtgttggaccccggcctgcaaaagagttagtatatgtctttattaga

SEQ ID NO: 637 - DNA, 5770 bp, Zea mays
  VARIATION (3621)..(3621): /replace="c" or "g" or "t"
  misc_feature (3621): /note="Nucleotide given in the sequence has no preference with respect to those in the annotation for said position"
  source: /note="Zea mays BAC clone full insert sequence contig bacm.pk108.h15-2.fis34"
atccacttatgataaagatttatatgctttagttcgaactttggaaacatggcaacactacttatggcctaaagaatttgttatacattctgatcatgaatctttgaaacatctaaggagacaaacaaatctgaaccgtaggcatgccaagtgggtcgaatttattgaatcttttccctatgtgatcaaacataagaaaggaaaagataatgtcattgcggatgctttgtctcgtcggtacaccatgttgtcccaactagattttaagatttttggcttggagacaattaaacaacaatatgctttcgatgctgatttcaaagatgtgcttttacaatgtaaagaaggaaggacatggaacaaatttgttctcaccgatggctttgtgtttcgggctaacaaattatgcattccagcttgttctgtgcgtatattattattacaggaagcacatggaggtgggttgatgggacattttggtgtgaagaagacagaagacatattagcgagccatttcttttggccaaagatgagaagagacgtggagcgatttgttgctcgctgcaccacttgtctcgttgcgaaaaacgaagaaatggttccggtgacaaaaactcgtgctttgtatgcaccccgacacccgttttcggaatgggtgacgtgtggcaacgaaattgcgcgaaaccaccccaaacatgagttttggacctaaagtagtggattgggcatgttctttgcaaaaaacgaagaaatggttccgttggcaaaaactcgtgctttgtatgcaccccgacacccgttttcggaatgggtgacgtgtggcaacgaaattgcgcgaaaccaccccaaacatgagttttggacctaaagtagaggattgggcatgttcgttgcgaaaaacgaagaaatggttccggtggcaaaaactcgtgctttggatgcaccccgacacccgttttcggaatgagtgacttgcggcaacgaaattgccctaaaccaccccaaacatgagttttggacctaaagtagtggattgggcatgttcgttgtgaaaaacgaagaaatggttccggtggcaaaaactcgtgctttgtatgcaccccgacacccgttttcggaatgagtgacgtgcggcaacgaaattgcgcgaaaccaccccaaacatgagttttggacctaaagtagtggattgggcatgttcgttgcgaaaaacgaagaaatggttccgttggcaaaaactcgtgctttgtatgcaccccgacacccgttttcggaatgggtgacgtgcggcaacaaaattgcgcgaaaccacccaaaacatgagttttggacctaaagtagaggattgggcatgttcgttgcgaaaaacgaagaaatggttccggtggcaaaaactcgtgctttgtatgcaccccgacacccgttttcggaatgagtgacgtgcggcaacgaaattgcgcgaaaccaccccaaacattagttttggacctaaagtagtggattgggcatgttcgttgcgaaaaacgaagaaatggttccggtggcaaaaactcgtgcttgtatgcaccccgacacccgttttcggaatgtgtgacgtgctgcaacgaaattgtgcgaaaccaccccaaacatgagttttggacctaaagtagtggattgggcatgttcgttgcgaaaaacgaagaaatggttccggtggcaaaaactcgtgcttgtatgcaccccgacacccgttttcggaatgggtgacgtgcggcaatgaaatcgcgcgaaaccaccccaaacatgtgttttggacctaaagtagtggattgggcatgtacgttgcgaaaaacgaagaaatggtttccggtggcaaaaactcgtgcttgtacgcaccccgacacctgttttcggaattggtgacgtgcggcaataaaattgcgcgaaaccaccccgaaacattggttttggacctaaaatagtggattgggcatgttcgttgcgaaaaacgaagaaatggttccggtggcaaaaactcgtgctttgtatacaccccgacacccgttttcggaatgggtgacgtgtggcaacgaaattgcgcgaaaccaccccaaacatgagttttggacctaaagtagtggattgggcatgttctttgcaaaaaacaaagaaatggttccgttggcaaaaactcgtgctttgtatgcaccccgacacccgttttcggaatgggtgacgtgcggcaacgaaattgcgcgaaaccaccccaaacatgagttttggacctaaagtagaggattgggcatgttcgttgcgaaaaacgaagaaatggttccggtggcaaaaactcgtgctttgtatgcaccgcgacacccgtttttggaatgagtgacgtgcggcaacgaaatggcgcgaaaccaccccaaacatgagttttggacctaaagtagtggattgggcatgttcgttgcgaaaaacgaagaaatggttccggtggcaaaaactcgtgcttgtatgcaccccgacacccgttttcggaatgggtgacgtgcggcaatgaaatcgcgcgaaaccaccccaaacatgtgttttggacctaaagtagtggattgggcatgttcgttgcgaaaaacgaagaaatggttccggtggcaaaaactcgtgcttgtatgcaccccgacacctgttttcggaattggttacgtgcggcaataaaattgcgcgaaaccacccgaaacattggttttggacctaaaataatggattgggcatgttcgttgcgaaaaacgaagaaatggttccggtggcaaaaactcgtgcttgtatgcaccccgacacccgttttcggaatgtgtgacgtgctgcaacgaaattgtgcgaaaccaccccaaacatgagttttggacctaaagtagtggattgggcatgttcgttgcgaaaaacgaagaaatggttccggtggcaaaaactcgtgcttgtatgcaccccgacacccgttttcggaatgagtgacgtgcggcaacgaaattgcgcgaaaccatcccaaactatgagtgttggacctaaagtagtggattgggcatgttcgttgtgaaaaacgaagaaatggttcttgtggcaaaaactcgtgcttgtatgcacctgatgaggacatcactatcattgatacaaccatacgagtgaccacttcaccattcgtagctaatcaaggaccaatgacacgagcccgtgcacgtaaacttaattatcaggtgaactcgttccttgctattgaagctaattcttctttaattgaggtactaaagccttgcgatgacttttttatgctcaggtgtttgggaggtgaaccatcttggactggagaaggcaacaaggcaataaaggctgcagcacccgagaggatttcgtaacagcatcaagtacaagtttaaatggggcatatcttccaacttccaaggccgtttaatgcaaataaatacttgttggaaagctcccttcgtctacttgctggtggatcaagaattaatgggagactacacccgaggcgtccaggaactgccgagggaacttcatgactccaccagaattccttcttcctatttctctatttaagcaactagcagccaccaaagaacttgagttctgtttgatgtaagtttagcctttgctacttccttgtaaacgcgtgtgtcggctagaccacccgaatacttgaaacgggaccccaactttatcagatccatgcgtgtttgcttgttatcttgttctagcttgttctcgattgcttgcaggttcaaggctgttcttggcacggcaagagcagcaacaacaggagccggtgtaactatcgctaaggcgcagcacccttgtggttgttgtagtcggatagcacaacgtcgacctccaccccaaatcgtagttatcaggagacggtgtacctgtcgctcaaggcgccacaccatcttggttgtggtagtcgggcagccaacgttgttctccaacaagtttttccacctccatcatctctcatcgaaagatcgggcacccttctacccgttgggttcatcaagtggtaccaaatttcaggttgctcggtgagagatctccatcttccttattttatttacctacagtccacttttgccaaagatatatttagagcagaaaatcacctagaaacattttgagcctttgctgtactacttagttttcgacttgttgaattcacggttgctgcatttgtgtcgagttgctggtccaaagtttcttgctgcagagtttcgagttcgtgccaccttgtttagatctccatctttagttctctagctgttctctagctgtagttcaaaaaaaacaaggaaaaggaaaaggcaagtgcacaaaaaaagtcgtgctgataaaaaagcacgtacaaaaaagagaaaaaaatcacagtaagaatattggtagataaaattccatgtgcaacaaaacaaagacagtttgtgtgccaccgtttcacaattttctaagtcagcttgctgttttgagtatttggtgatatcatttgtgtaacggctcgcgtctctattatggtttggactaggaccagcacaacaccattgtggaacgtttattcaacttgttgtggctaatgtggtactagctattccttggaactatagttttagcagccactgttgtgctagcagccaccaggttgtgctagcagccactgttgttgttcttgctgtttgccagcgccactttctttgcgtggtgagaacttgtaagagcttgatttcttcctagtgaggcagtgtttatccatccacatcatagcaactactaggctgcattacttgtttttgtatctcttttgcactaaccatggcagaggatgcaaatgcgcgacctccacattctccacgaaccgtgggcatcatacaacatttcgaacgtcaagtaaggttgcacacagatgccctcaacgaagatgttcaagtcaccaatgagcgcattggtcaattagaaacaacacaaattgttaccaacaacacattgaccactttggaacgaacagttgctgctactaacacctctcttgcagcaattattgagcgcttagataggatggaccaagttgggcgtgaaggtaggcaacaaggtgatgatgatgccatggttccattactggtaccgcaagagatgatgctacggagtattcagcagacaccgagcgtgatgaccgatctattaggcactgacgacaccaacgacgtgatcgccatggcttgggtggtcgacctccacgacgtgaggtacatgaaaatgatgattctctaggaagaattaaattctccataccaccgtttgctggaaaatatgatcctgatgcatatctaacatgggaattgtcggtagatcaaaaatttgcatgctatgatttttctgaagataaaaaggttagagctgctacgagtgaattcactgattttgcttctatttggtggcatgagtaccaaactacacatccagctaccataccacaaacttggaatgctttaaaaagaatcatgcgtagtcgttttgttccttcctatcatgctcgtgatttattacataaattacaacagcttagacaaggcaacaaatctgttgaagagtattatcaacaattacaaataggcatgttgaggtgtggtctcgtagaaaatgaaaaagctgcaatggctaggttcatgggtggtttgacaagagaaatttaggatatattagcttacaaggaatacactaatgttactcgctt

SEQ ID NO: 638 - DNA, 4613 bp, Zea mays
  source: /note="Zea mays BAC clone full insert sequence contig bacm.pk108.h15-2.fis35"
cgatgtcgcatcgcagctttcaactgatcccaagtggttggaatggcagtggtatgtttcattttatactcacgccaccaaattaaagcaaaatcagtaaattcactaatagcagctttaacctgagaatgtgcagcaatatcatggcatgaaaatttttgttcaacctctaactcccaatcaagatatgcagcaggatcatatttgccattaaaaggtggaattttaaatttaatcttagaaaataagtcattagggggatgacgaaccacacggcgtgcacgaccacgtcgatctccgtcgtcctgctcagtgtcaccgccgtagtcctgctccatctttgtggtcaacgcatcaaggcgtgccaggatggtgtcgagtgtggtgcgagtcgccgtttgagcaaggtcaagctggttgaaacactcggtcgtcgaagtgaccgttgaatcaagccgttcatgcatcgtcctaatgtcagcagcaagtccatcaacttgtccccttacttcctgcaactgggcatccaccgtgtcgtgtgctcctgccatagttagcgcaaacaccaaaaggagaaaaaaaccaacgacaaaaacaggggtgtactgcttacaaggcgctcacactagtgctgttatcaagttcttatccgttcttaccaagccacagtggtgaactgcaagcaacaggtggaaccggtgaaagattggatgagcgattgcgtggagaaacagaaacctgctcgtcgtagaaatatgtggagttgtgggtaggctgcactcaagtcaaggattagcacgatcaaacaataatgcaaagtttaattatagtgcaaaacacgaaactatattgctggccacaggtgcaaaggatggatggaactagcagaatggcagtaccgtaaatactgtactagtgatgccaaaaaaggcactagtagaaatcacaggtgattttgtttttcttttttgtatgatttttttgatatttttctcagcacaagaagcaacaagataggagctagacgaagtttcacctaaaacagagatcagatgtggtctacagaaaatcaggaagttctctgaaaagcgtgcgagaactttgacgaatttttttctttattttcctgaatttttttgacaattttgtcgaaaccaaacagaccgaaggtgagtttggccggcctcagaatggtgtcaaatagctcctgtaaaaatttcagattttttggacacccgagcgaaaagttatgcccggtttaaggaaggtacctcaagttatgttttcaaacgaccgggatgaaacaaccatatcctttctccttcgttgttttttgtttctattttttttgacgtaaccgaaggagaaaaacaaggaaacgatgttgactcggtttgtttttttttctgtttttttttcgtaaccgaaggagaaaaacaaggaaacggccgttgactcggtttgttttttctgttttttttacgtaaccgaaggagaaaaacaaggaaacgatgttgacttagtttgtggagtgatcaaaggggagatggtggcggcgctagggtttgaatggtggaagaacacaatgcaaccagcaacaaatgacgcgaaagcacacaaattcaacaatgcagattattgaaagaaagtgcgaggctcaaaagggtgttgggataaggtctaacctgaatttttatgtggttttgtggactgtaggaaaaaaaacactcgataaactcaccgatcaacctggaaatctgataccaattgatgtagctgaggtgcccgatctttcggcgagtagagataattccgatttggcggaagatgacccttgcgatccgactacgacgagcaagcccgaggcgccaatgcaatcgctgaaccaactccctgtggttaccgaccttgctgatgcgagatcggcctgatcacgaagatcgtttcttgtgcgcaatcgaagaacgaacaagaaaaagatgcgagcaatctaatctattactcgagggtggagttctgaatacacgaagacagcgcagatttgcgcgtgttcgagagtagctaaggctaacgtaaaacaaaactcccaaaataaaggaggcgcagctcctgaataaatagagagggggcgcagcccctaggggcggccaaccctaggtcgtccattatgggccgcaattgggctggtcgtctattcttccgggccttcgttctttaacaacatgatgtagttcaattctcttgcacgggcccgagtcactggcccaggtggaaggggtggcgcctgggctggagaaggtgctgctggtgtagatgtgctcgtgttggtgttgatgtccgcatcaggcccgagtcactggcccaggtggaaggggtggcgcctggactggggtagatggtgcctgggctggagaaggtgctactggtgtagatgtgctcgtgttggtgttgatgtcctcatcacatgtgttttggacctaaagtagtggattgggtatgttcgttgcgaaaacgaagaaatggttacggtggcaaaaactcgtgcttgtatgcaccccgacacccgttttcggaattggtgacgtgcggcaataaaattgcgcgaaaccaccccaaacatgtgttttggacctaaaatagtggattgggcatgttcgttgcgaaaaacgaagaaatggttccggtggcaaaaactcgtgcttgtatgcacccgacacccgttttcggaatgggtgacgtgcggcaatgaaattgcgcgaaaccaccccaaacatgagttttggacctaaagtagtggattgggcatgttcgttgcgaaaaacgaagaaatggttccggtggcaaaaactcgtgcttgtatgcaccccgacacccgttttccgaatgggtgacgtgcgggaatgaaatcgcgcgaaaccaccccaaacatgagttttcaatctaaagtagtggattgggcatgttcgttgcgataaacgaagaaatggttccggtggcaaaaactcgtgcttgtatgcaccccgacacccgttttcggaattggtgacgtgcggcaaaaaaattgcgcgaaaccaccccaaacatttgttttggacctaaaatagtggattgggcatgtttgttgcgaaaaatgaagaaatggttctggtggcaaaaactcgtgcttgtatgcaccccgacacctgttttcggaatgggtgacgtgctgcaacgaaattgtgcgaaaccaccccaaacatgcgttttggacctaaagtagtggattgggcatgttcgttgggaaaaacgaaaatatggttccggtggcaaaaactcgtgctttgtatgcaccccgacacccgttttcggaatgagtgatgtgcggcaacgaaattgcgcgaaaccaccccaaaaatgagttttggacctaaaatagtggattgggcatgttcgttgcgaaaaacgaagaaatggttccggtggcaaaaactcgtgcttgtatgcaccccgacacccgtcttcggaatgggtgacgtgcggcaacaaaattgcgcgaaaccaccccaaacatgtgttttggacctaaagtagtggatttggcatgttcgttgtgaaaaaggaagaaatggttccggtggcaaaaactcgtgcttgtatgcaccccgacacccgttttcggaatgggtgacgtgcggcaacgaaattgcgcgaaactactcttaacatgtgttttggacctaaagtagtggattgggcatgttcgttgcgaaaaacaaagaaatggttccggtggcaaaaactcgtgcttgtatgcaccccgacacccgtttttggaatgggtgacgtgctgcaacgaaattgcgcgaaaccactcttaacatgtgttttggacctaaagtagtggattgggcatgtccgttgcaaaaaacgaagtaatggttccggtggcaaaaactcgtgctttgtatgcaccccgacacccgttttcggaatgggtgacgtgcggcaatgaaattgcgcgaaaccactccaaacatttcttttggacctgaagtagttgattgggcatgttcgttgcgaaaaacgaagaaatggttccggtggcaaaaactcgtgcttgtatgcaccccgacacctgttttcggaatgggtgacgtgcggcaatgaaatcgcgcgaaaccaccccaaacatgtattttggacctaaagtagtggattgatgttcgttgcgaaaaacgaagaaacggttccggtggcaaaaactcgtgctttgtatgcaccccgacacccgttttcggaatgagtgacgtgcggcaacaaaattgcgcgaaaccaccccaaacatgagttttggacctaaagtagtggattgggcatgttcgttgcgaaaaacgaagaaatggttccggtggcaaaaacttgtgcttgtatgcaccccgacacccgttttcggaatgggtgacatgcggcaacgaaattgcgcgaaaccaccccaaacatgagttttggatctaaagtagtggattgggcatgttcgttgcgaaaaacaaagaaatggttccggtgggcaaaactcgtgcttgtatgcaccccgacacccgtattctgatgggtgacgtgcggcaatgaaatcg

SEQ ID NO: 639 - DNA, 4705 bp, Zea mays
  source: /note="Zea mays BAC clone full insert sequence contig bacm.pk108.h15-2.fis36"
ttcggaccttcggcttaaagccttcgtccatgtcgcaatctaaatttattaacaaattaatattgcgaggggctactgttgggggccttcggcttccgaaggtcctcaaaaaccatgatttaacaatgtttctggagtataatgtgtgaacaggtatcttcggacttgtatcagaaagggagaagctcaaaagatacgaaggttgacacagtgccgaagctgtgaagcaggaaagcttcggcatgttcgcagaaaagggaaccgacttaaagatgaaaaggccatttggacctcgatagaatgctatagaattatcaccaaatgtaaaggacatgtatgtaattttgtgtgggttgtaccccgtgcctataaataggtgaacagtacccccgtactgttcacgcagatctggcatttgcttttgcgtcacacttgtattttcatctccttccaagccgaaggtacatttataattcgatattgtttctatttctttatgatgatataataaagttaaatgaatgatgttatatgattattcatgctatcttttatgtttcatatgcttcatttttcattaatgtatactgtgatgacgaaggttcgtccttcatggccttcgttcgaagatcgttatatcctaagggaaataatgcttcgaaggacgaaggactttatcgtttaacattctctgtgttgccttgttcttaactcatagcatttgagaacaagtccccaacagttcctgtggcaaaaactcgtgctttgtatgcaccccgacacccgttttcggaatgggtgacgtgtggcaacgaaattgcgcgaaaccaccccaaacatgagttttggacctaaagtagtggattgggcatgttctttgcaaaaaacaaagaaatggttccgttggcaaaaactcgtgctttgtatgcaccccgacacccgttttcggaatgggtgacgtgcggaaacgaaattgcgcgaaaccaccccaaacatgagttttggacctaaagtagaggattgggcatgttcgttgcgaaaaacgaagaaatggttccggtggcaaaaactcgtgctttgtatgcaccccgacacccgttttcggaatgagtgacgtgcggcaacgaaatggcgcgaaaccaccccaaacatgagttttggacctaaagtagtggattgggcatgttcgttgcgaaaaacgaagaaatggttccggtggcaaaaactcgtgcttgtatgcaccccgacacccgttttcggaatgggtgacgtgcggcaatgaaatcgcgcgaaaccaccccaaacatgtgttttggacctaaagtagtggattgggcatgttcgttgcgaaaaacgaagaaatggttccggtggcaaaaactcgtgcttgtatgcaccccgacacccgttttcggaatgggtgacgtgcggcaatgaaattgcgcgaaaccaccccaaacatgtgttttggacctaaagtagtggattgggcatgttcgttgcgaaaaacgaagaaatggttcgggtggcaaaaactcgtgcttgtatgcaccccgacacccgttttcggaatgggtaacgtgcggcaacgaaattgcgcgaaaccaccccaaacatgagttttggacctaaagtagtggattgggcatgttcgttgcgaaaaacgaagaaatggttccggtggcaaaaactcgtgctttgtatgcaccccgacacccgttttcggaatgggtgacgtgcggcaacgaaattgtgcgaaaccaccccaaacatgagttttggacctaaagtagtggattgggcatgttcgttgcgaaaaacgaagaaatggttccggtggcaaaaactcgtgcttgtatgcaccccgacacccgttttcggaatgggtgacgtgcggcaatgaaatcgcgcgaaaccaccccaaacatgtgttttggacctaaagtagtggattgggcatgtacgttgcgaaaaacgaagaaatggttccggtggcaaaaactcgtgcttgtatgcaccccgacacctgttttcggaattggtgacgtgcggcaataaaattgcgcgaaaccacccgaaacattggttttggacctaaaataatggattgggcatgttcgttgcgaaaaacgaagaaatggttccggtggcaaaaactcgtgcttgtatgcaccccgacacccgttttcggaatgtgtgacgtgctgcaacgaaattgtgcgaaactaccccaaacatgagttttggacctaaagttgtggattgggcatgttcgttgcgaaaaacgaagaaatggttccggtggcaaaaactcgtgcttgtatgcaccccgacacccgttttcggaatgggtgacgtgcggcaatgaaatcgcgcgaaaccaccccaaacatgtgttttggacctaaagtagtggattgggcatgtacgttgcgaaaaacgaagaaatggttccggtggcaaaaactcgtgcttgtatgcacccagacacctgttttcggaattggtgacgtgcggcaataaaattgcgtgaaaccacccgaaacattggttttggacctaaaatagtggattgggcatgttcgttgcgaaaaacgaagaaatggttccggtggcaaaaactcgtgctttgtatgcaccccaacacccgttttcggaatgggtgacgtgtggcaacgaaattgcgcgaaaccaccccaaacatgagttttggacctaaagtagtggattgggcatgttctttgcaaaaaacgaagaaatggttccgttggcaaaaactcgtgctttgtatgcaccccgacacccgttttcggaatgtgtgacgtgctgcaacgaaattgtgcgaaaccaccccaaacatgagttttggacctaaagtagtggattgggcatgttcgttgcgaaaaacgaagaaatggttcctgtggcaaaaactcgtgcttgtatgcaccccgacacccgttttcggaatgggtaacgtgcggcaacgaaattgcgcgaaaccaccccaaacatgagttttggacctaaagtagtggattgggcatgttcgttgcaaaaaacgaagaaatggttccgttggcaaaaactcgtgctttgtatgcaccccgacacccgttttcggaatgggtgacgtgtggcaacgaaattgcgcgaaaccaccccaaacatgagttttggacctaaagtagtggattgggcatgttctttgcaaaaaacgaagaaatggttccgttggcaaaaactcgtgctttgtatgcaccccgacacccgttttcggaatgggtgatgatgcggacatcaacaccaacacgagcacatctacaccagcagcaccttctctagcccaggcgccaccccttccacctgggccagtgacttgggcccgtgcaagagaattgaactacatcatgttgttaaagaacgaaggcccggaagaatagacgaccagcccaattgcggcccataatggacgacctagggttggccgcccctaggggctgcgccccctctctatttattcaggagctgcgcctcctttatttcccgagttttgttttacgttagccttagctactttcgaacacgcgcaaatctgcgctgtcctcgtgtattcagaactccaccctcgagtaatagattggattgctcgcatcttgttcttgttcgttcttcgattgcgcacaggaaacgatcttcgtgatcaggccgatctcgcatcagcaaggtcggtaaccacagggagttggttcagcgattgcattggcgcctcgggcttgctcgtcgtagtcggatcgcaagggtcatcttccgccaaatcggaattatctctactcgccgaaagatcgggcacctcagctacatcaattggtatcagatttccaggttgatcggtgagtttatcgagcgttttttttcctacagttcacaaaaccacataaaaattcaggttagatcttatcccagcacccttttgagcctcgcactttctttcaataatctgcattgttgaatttgtgtgctttcgcgtttccttgttgctggttgcattgtgttcttccaccattcaaatcctagcgccgccaccatctcccctttgatcacgccacaaaccgagtcaacattgtttccttgtttttctccttcgtttacgtcaaaaaaaaaaacagaaaaaacaaaccgagtcaacgaccgtttccttgtttttctccttcggttacgaaaaaaaaacagaaaaaaaaaccgagtcaacatcgtttccttgtttttctccttcggttacgtcaaaaaaaaaacaaaaaaaaagataacgaaggagaaaggatacggttgtttttcatcccggtcgtttttagaacataacttgaggcaccttccgtaaaacgggcataacttttcgctcgggtgtccaaaaaatctgaaatttttacaggagcttgttgacaccattctgagcccggccaaactcaccttcggtctgtttgggttcgacaaaattgtcaaaaaaattcaggaaaataaagaaaaaaaatccgtcaaagttctcgcacgcttttcagagaacttcctgattttctgtagaccacatctgatctctgttttaggtaaaacttcgtctagctcctatcttgttgcttcttgtgctgagaaaaatatcaaaaaaatcatacaaaaaaagaaaaacaaaatcacctgtgatttctac

SEQ ID NO: 640 - DNA, 7129 bp, Zea mays
  source: /note="Zea mays BAC clone full insert sequence contig bacm.pk108.h15-2.fis37"
gtggaatttacaattggttcataccatgattatattgattgtgatgtggtacctatgcaagcttgctctatgttatttggtagaccatgacaatttgataaggacaccgtgcatcatggtaaaacaaatcactactcttttatgcataatgagaagaagcttgtattgcaccccatgtcccccgatgctattttgaaggatgaagttgctagagcttgcaaagagaaaaataaatctgttcataataaaaatctaggtgctgcaaaggagttggtacaacataagagtgacaattctaaatctgctcaagtgaggaagacagaaatacaactgaaaagtgcttgttttcttgcttccaaatctgatttacttgaattaaatgatgttgcttcaatctgctatgtatttatttgcaaggatgctttgttctcacttcacaacataccatctactttgccttctactgtcactaatcttttgcaggaatatgctgatgtatttccaaatgatgtgccacctggcctgccaccgataagaggaattgagcatcagattgacctcatcccaggggcttccttgccaaaccgagcgccatacaggacgaacccagaagaaaccaaggagattcagtgagaagtacaagaattactcgataaaggttatgtgtgtgagtcccttagtccttgctctgtccctgttttattagtcccaaataaagattgctcatggcgcatgtgtgtagattgtcgaacaattaataacattaccattagatatcgtcatcctatccctaggttagatgatatgctgggatgaacttagtggctcgatgattttctctaaaattgacttacgtagtggatatcaccaaattcgcatgaagctaggggatgaatggaaaacggcatttaaaaccaagtttggtttgtatgagtggttagtcatgcctttcggtctcactaatgcacctagtactttcatgagattaatgaatgaggttttacgtgctttcattggaagatttgtggtcgtctacttcgatgacatcttgatctatagcaaatgtctagtagatcatcttgatcatctacgtgctgttttcaatgctttacatgaagcgctcttatttggtaaccttgacaagtgcacattttgcacagaccgtgtctcttttcttggctatgttgtgacaccgcagggaattgaagttgatcaggctaaggtggaggccatagatagctggccagtccctaccacggtcacgcaagtccgaagctttctcgggcttgcggggttctatcgtcgatttgtgaaagatttcagcaccatcgcagggccattgcacgagcttactaagaagggtgctccattttcttggggcaaggcgcaagaggttgcatttgaaacattgaaggataggttaactcatacaccccttctccaattacctgatttcagtaagacttttgaattggaatgtgatgctagtggtattggtttgggtggtgtcttgttgcaagaagggaagcctattgcttattttagtgagaaactgaatggacccagtctgaactattccacttatgataaagaattatatgccttagttcgaactttggaaacatggcaacactacttatggcctaaagaatttgttatacattctcatcatgaatctttaaagcatctaaggagccaaacaaatctgaaccgtaggcatgccaagtgggtcgaatttattgaatcttttccctatgtgatcaaacataagaaaggaaaagacaatgtcattgcagatgccttgtctcgccgttataccatgctgtctcaacttgattttaagatttttggcttggaaacaattaaacaacaatatgttttcgatgctgatttcaaagatgtgctattacattgtaaagaaggaaggacatggaacaaatttgttctcactgatggctttgtgtttcggactaacaaattatgcattccagctggttccgtgcgtatattattattacaggaagcacatggcagtgggttgatgggacactttggtgtgaagaagacagaagacatcctggccagccatttcttttggccgaagatgagaagagacgtggagcggtttgttgcttgctgcactacatgtcaaaaagctaagtctcgccttaattcacatggtttatacatgcctctcccagttcctagtgcaccatgggaggatatttctatggactttgttttacggctatctagaacaaagaaggggaggaatagtatttttgttgttgtggacagattttcaaaaatggcacactttataccatgtcacaaaactgatgacgctacccatgttgctgatttgttctttcgtgaagttgttcgtttgcatggggttccaaacactattatgtccgatcgggataccaaatttcttagtcatttttggaaaacgttatgggctaagttaggaactaaattgctcttttctactacttgtcaccctcaaaccgatggacaaaccgaagtcgtaaaccatagtttatctaccatgcttagggctgttctgaaacataacatcaaattgtgggaagaatgtttgcctcacattgaatttgcttataatcgttctcagcattctacaactaaactatgcccttttaaaattgtgtatggttttgtccctcgtgctcctattgatcttatcgccatcccacattctgaaataacgaattttgatgcttctcgtcgtgctgagctgattataaagctgcatgaacaaactaaagcaaatattaaagccatgaatgctaagtatgaagaagcaggtagcaagggtagacagcatattacctttgaacctggtgatttagtatgggtgcatttaaggaaagatagtgatgaggacatcactatgagtacgactacaccagcagcacctccacatcaagcgccacttccttcataagctgggccaatcactcgggcccgtgccagagatcttaacttcgtcatgctactgaagaatgagggcccagaagaatagacgaccagcccaactgcggcccatagtggacgacctagggttggccgcccctaggggctgcgccccctctatttatccaggagctgcgcctcctttattttcgagttttgttttacgttagccttagctactctcgaacacgtgcaaatctgcgttgtcttcgtgtattcagaactccaccctcgagtaatagattagattgctcgcatctttttcttattcgttcttcgattgcgcacaggaaacgatcttcgtgatcaggtcgatctcgcatcagcaaggtcggtaaccacagggagttggttcagcgattgcattggcgcctcgggcttgctcgtcgtagtcggatcgcaagggtcatcttccgccaaatcggaattatctatactcgccgaaagatcgggcacctcagctacatcaagcaacacctccacatcgagcgccacttccttcattagctgggccaatcactcgagcctgtgccagagatcttaacttcgtcatgctactgaagaatgagggcccagaagaatagacgaccagcccaactgcggcccatagtggacgacctagggttggccgcccctaggggctgcgtgatgcacccagcccaggtggggttggccgaggcccaacaaattagggttgcccggagcccaacagttcattaagcacacccaactcagggaaaggcccaatcgcccaaaagactagcccaatgggggaagggtggctctcccttttaaagtggcttcctcctcccaagttaagcgaggtgggataattctgaggctcacacggtcgccgtccgactacaattgggccaactgggccaattgcgtctttgccaacgggtaatagtggaggatgtcctcatcattcccaccttcttaaaatgggccctagctctgataccagatgatgcacccagcccaggtggggttggccgaggcccaacaaattagggttgcccggagcccaacagttcattaagcacacccaactcagggaaaggcccaatcgcccaaaagactagcccaatgggggaagggtggctctcccttttaaagtggcttcctcctcccaagttaagcgaggtgggataattctgaggctcacacggtcgccgtccgactacaattgggccaactgggccaattgcgtctttgccaacgggtaatagtggaggatgtcctcatcactgcgcccctctgtatttatccaggagctgcgcctcctttgttttcaagttttgttttacgttagctttagctactctcgaacacgcgcaaatctgcgctgtcttcgtgtattcagaactccaccctcgagtaataaatttgattgctcgcatctttttcttattcgttcttcgattgcgcacaggaaacgatcttcgtgatcaggccgatctcgcatcagcaaggtcggtaaccacagggagttggttcagcgattgcattggcgcctcgggcttgctcgtcgtagtcggatcgcaagggtcatcttccgccaaatcggaattatctctactcgccgaaagatcgggcacctcagctacatcaattggtatcagatttccaggttgatcggtgagtttatcgagtgtttttttctcctacagtccacaaaaccacataaaaattcaggttagaccttataccagcacccttttgagtctcgcaccttatttcaataatatgcattgttgaatttgtgtgctttcggttcatttgttgctggtcgcattgtgtttttttctcaccatccttcttctaccttgtttttctccttcggttacatcaaaccctagcgtgtcgcaaccatcttccttgtttctctccttcggttacatcaaaccgattcaacgccacaaaccgagtcaacgccgcttccttgtttttctccttcggttacgtaaaaaaaacagaaacaaaaaaaagaaaagaaaaaaaagaaaaagaaagagaaagcatagaaccagagaacaaacaaaaaaatagggaaaggaaacaaagcggttgtctcatctcggtcggtttaaacataacttgaggtaccttccttaaaccgggcataacttttcgctcggttgtccaaaaaatctgaaatttttacaggagctagttgacaccattctgaggccggccaaactgacctatggtctgtttgggtttcgacaaattgtcaaaaaatttcaagaaaataaagaaaaaaattcgtcaaagttctcgcacgcttttcagagaacttcctgattttctgtagaccacatctgaactttgttttagtgaaacttcttgtagctcctattttgttgcttcttgtgctgagaaaaatatcaaacaaatcatacaaaaaagaaaaacaaaatcacttgtgattcctactagtggcctcgctagtacaatatttacagtactgccattctgctagttccatccgtcctttgcacttgtggccagcaatatagtttcgtgttttgcaatataattcaactttgcattattgtttgatcgtgctaatccttgacttaagtgtagcctacccaaaactccacatatttctacgacgagaaggtttctgtttctccaggcaatcgctcatccaatctttcaccggttccacctgttccacctgttggttgcagttcaccactgtggcttggtaagaacggataagaacttgataacagcactagtgtgagcgccttgtgagcagtacacccctgtttttgtcgttggtttttctccttttggtgtttgcgctaactatggcaggagcacacgacatggtggatgcccagttgcaggaagtaaggggacaagttgatggacttgctgctcacattagggcgatgcatgaacggcttgattcaacgatcatttcgacgaccgagcgtttcgaccaacttgaccttgctcaaacggcgactcgtaccatactcgacaccatcctggcacgccttgatgcattgaccacaaagatggagcaggaatacggcggtgacactgagcaggacgatggagatcgccgtggtcgtgcacgtcgtgtggttcgtcatccccctaatgacttattttctaagattaaatttaaaattccatcttttaatggtaaatatgatcctgctgcatatcttgattgggaattagaggtagaacagaaattttcatgccatgatattcctgctaatagccaagtgaaggctgccattagtgaatttactgattttgctttaatttggtggcgtgagtataaacaaaaacttcccattaacagtgtcattacttggacccaattaaaaactgccatgcgccacagatttgttccttcctattatgctcgtgatttgcttaacaaaatgcagcgttttcaacaaggttcacagtctgttgaggaatattaccaggagttatgttggggacttgttctcaagtgctaagagtttaagaacaaggcaacatagaaaatgttaatcgttaatgcccttcgtccttcgaagcactatttcccttaggacataatgccttgcggacgaaggttatgaaggacataccttcataaattaatcaaataatgacgaaggatgaaatgtgaagaatgtaaaggaaaacatgaacaatcatttattattattgaacataaacaaaaatattattgaacaacaagtgtaccttcaatcggaaggaaatgattgtacaagcgtgacgcaaaaagcgaatgccaagtcagcgtgaacagtacagggatactgttcacctatttatagacacgggacacagcccttacaaaattacattcatgccctttacatctgacaataactctatagtaatctattgaggtctgaatagccttttcatctttaagtcggttccactctctgctgttacgccgaagctttcctgctcaacagcttcggctctgtatcaagcttcgtattattccggtctgctgcaatgccgattttagtctgagggtacctgttcacatattgtactacagaaatactgttaaattctgtttttgaggaccttcggacgccgaaggtccccaacagtagcccctcgcaatattaat

SEQ ID NO: 641 - DNA, 5809 bp, Zea mays
  source: /note="Zea mays BAC clone full insert sequence contig bacm.pk108.h15-2.fis38"
ggctattaatacacaggccaccctatcctaaggttaggttttgcatattcctacatggtactagagccacacaaacttcctccctcccctagccggccgccagcccctggccgccgccgctgcccctttccccatccccctccggccaccgccagatcgcctccatcccctctctccttcctggtcgccggccgcacccgcttctcccccttctccggtcgacgtcttcctcctccccccggccggcgagctcgggctcaaccgcgtcgtcgaccatccggccgcgctcacctctccctcccccagccggcgagctcgggctccaccgcgccccgaccagctagcgtgctcggtggccgcggcaccgcccaccacatccgcgccctcccctcgcgcgcggccacatcgtccgactgaagcagcaggcgcgtgcggctgcgcgtggcgctgtcggccacgagcgccttggaccgttgcaaccgccggagcgccgactcgctgctcttgcttcctctctgccccgcccccagcacctacagagcccgccgatccctgccccggccgccgaatcttcgtcgtccaccgccggccgccatctggcccctctcctgctgcgctgggccccggcgccgtgcccgctcttcccaagccgtgccgcaagtgggtcggcctcgccggagcagcctgcccccctgcgctccctcctgtcgtgccgcagtgggttggcctggccggagcagcagtcgtggccgtacagcccgctcaccccctgtgcgccctgcttctgtgacacagtggacatcctcgccctcggctttgctgcgccggttgagctccgtcccggttccatggcgtccccaccaccacacatgagctttgcctcgcccgctgctcccgtggctcctgactaccacggtcgtgcttttgccctggccgtcggcgccacttcttgtctccgcccgtttctgtcgggatggctgtgcgcgtccttctcaacgatggccagctcgtccggggcaccttcgtgagcttcgatcccaccatgagccctgtcctttgtgactgcgtcgaactccacccccaggccgaccgtcacgtgcctagaccccttgtcttccctcgtgcagtgatcgcctccctggccattgagccctcgttccctccctcccctcccagtaaccacgtcagagctcatcctctggtctctccgtgcaccctatggcctccccactgtctccctctcccaccgattgggtggtcgactccggggcctccttccacaccactcccacaactagttcgttattccactcccatccaccacacccctcacatccttcctccattgtcgtaggcaacggttccactcttccggtcacatcagtaggtgcatcagttcttcctggaccattctgccttaacgacgtccttgttgctcccggtctgactcatcccctcctctcggttcgtcgcttcactagtgacaaccactgctttatggagttcgacccctgggatctcaccatacgccaccttcccacacatgttgtgctcgctcgctgtgacagctccggtcccctctattctcttcacttgccctccacttcccccaccagaatagcctcatctcctgcacttactactaccaccacatcacatgctcttgctactaccaccacctcctccgccatttggcactgttgcctcgggcaccctggacctgacgtcatgtcccaactctccagccactcagacatatcctatactcgaggctcttctgagcacctctatcatgcttgtcagctcggccgtcactctcgtcttcctttttccacttccacgtccagggttgttcaggcctttgatcttgtccactgtgatctctggacgtctcctgtccttagcctctccggctacaaatactacctggtcattctggacgactactcccattttctttggactttcccccttcggttgaagtccgacacgtttaccaccctcactcacttcttcgcctgggtatccacccagtttcagcgcccggttcgtgctttgcattgcgacaacggccgcgatttcgataaccacgcctctcggtcattcttcctcaccagtggcgttcagctgcgtctctcgtgcccctacacctccgcccagaacggtcgggcagagcgcatgattcgcaccaccaccaacatgatccgctgccttctcttccaggcgtctctccctgccagctactgggcagaagccctacacaccgccacccacctcctcaactgtcttccctccaaggcggtgagccaccctactccctacttcgccctgtacggcacagcccccacctacgaccaccttcgcgtgttcggttgtgcctgctaccctaacacttctgctactgcccctcataagctttctcctcgctccacccactgcctcttccttggctactcatctgaccataagggatatcggtgtctggacctcacctcccaccgcatcatcatctctcgtcacgtcgtctttgatgaggatgtgtttccccttgttggcccctccccgcctaccgatctcgactccctcctcgagtccgatccagtctccccctcctcccaggcgccccgccttgcgtcgttacccgcaccccatgcggcctcgacgccgcggctcgcacatattcccacgccacgcgcggccccgtcgatcacgcctgcgccacgcgcggccccgacgaccacgcatgtgccacgtgcggccccgtcgaccacgcctgcgccatgcgcgaccccgtcgaccacgcccgcgcctcgggcggccccgccgacccctcccgcacctcgcgcggccccgtcgacgccaacggttcgcttcaccgaccccgcgctcatctaccaccgtcaccgccacgtcactacctcggcagtcgctgacccgggcccgttgacgagcccggtgcgcttcgccgaccccgccgtcatccatcatcgctgcgagtcggccacgcccgcagcccctgacgtcccggcagaccgccccgagccaccgatgtaccactcggtcgctatccaccgcgatccctggcacgtccacccgatggtgacccagcgcgccactggcgtccttcgattgtcgaccggctgatcttggcagctgctacgcctaccactccaccggacgcttccccggtcccctcctccgttcgcaccgctctcgccgaaccacactggcgacgcgctatggaggagtacgcggccctcctggccaaccacacctgggacctggtgccacgtccaccaggcgccaacgtggtcaccggcaagtggctatttcgccacaagcttacttcggacggctccctcgatcgctacaaggcccgttgggtccttcggggcttcacccaacgccccagagtggactacgacgagacctctagccccgtcgtcaagttcgccactgttcgcaccgtcctctccctcgccctctcccgggactgggcgatccatcagctcgacgtcaagaatgccttcctccacggcactctgacggagactgtctactgcagccagcccaccggcttcgtcgacgaagcccgtccagatctggtctacaggctgaaccgctccctctacggcctcaagcaggcgtcgcgggcctggtacagccgcttcgcttcctacttgacctccatcggcttcgtcgaggccaagtcggacacgtccctcttcatctaccaccgcggcgacgacaccgtcttccttctgctctacatcgacgacattgtgctcacggcatccaccgccgacctcctacagcgcacgatcgtcgccctgcagcgggagttcgcgatgaaggacctagggcccctccaccacttcctcggcatcaccgccgagcgccggccccagggtctcttcctccatcagcgccagtacgccatcgacatactggagcgggctggtatgtccgactgcaagccctgctccacgcctgtcgacactcaggcgaagctctcagaggacgtcgggcccctggtcgccgatgcgacatcctaccggagcctgaccggcgcgctccagtacctcaccttatccaggcctgacatcgcctacgtcgtccatcaagtgtgcctccatatgcacaccccgcgggagcctcatctcaccgctctcaagcggatcctgcgctacctccgtgactccctcgactacggccttcttctccgaccatccccgacgtcggaactcgtggtctacaccgacgccgactgggctggctgtccagacacgcgtcgatccacctctggttacgccgtgttcctgggcgccaacctcgtctcctaggccgccaagcggcagcccgtcgtctctcgctccagtgctgaggccgagtaccgcgccgtggccaacggcgtggcagaggcctcctgctgcgacagctcctccacaagctccacagtcccctccagcgcgccaccctcgtctactgcgacaacgtcagcgcagtctacctctccaccaatcccgtacagcatcagcgcacgaagcacgtggagatcgacctgcacttcgtccgcgagcgtgtcgccgtcggtgacgttcgggttctcagcgtcccaactacgctgcagttcgctgacatcttcacaaggggttaccgtcgagtgtatttttagactttcgctctagtctcaacatctgtacaggatagagttgtgactgcggaggggtgttggaactgtattagggtttgggtacatttactctcttgtccctctgtaatgggccaggcccaactccaaatggctattaatacacaggccaccctatcctagggttagattttgcatattcctacaagaacaagacttgtacaaacttctgacataaaatctgctatttcgataaattaaaagatcaaattaaaaagaaactaatctctgcaactcctctaggatgctggattttttccttgtagacatctagacaagtgagaagggcaggtctggcacaatggtgagaaacctttccactgagcaaaaggtctaggattcaatgcagcctctctgcaaaatgcagaggtaaggattgccttggttactcctccggaccccactcatgtgagagctgccagcactgggtctgtcatttttttagacatctagacaggtcttgctgtagtcctaagttgtcttcggtggatcgtgtaaaataggggacgtggcactgtaaattacacttttaataggactaagatgcatcagcagtggctaaaacttgtccaagcatgttatcgagatccctgagctattaatttgcaatttcatgtccctcaacttgttatgtggttcactcaaggtgcaaaccccatggtaaatcctttggctggcgacgtggacactaacaagactctatgctgatggacattaacaaggtgtgaacgagaggggggagaaagagatgtaggggctgccaagtaggatggtcgtggactagctgattttgaaggatcgaaccctgagtgaaccatttaggaagatcagggatgttttgaatccaaactaatcgtttgggaacctagatgacattcccagacaatttgaagaatgtttgtgtattttattcttttaaaaggtgcctcaaaaacaatcacaaaaaatcaacttgggaaaaaagacccgtatgaaacagaaaatataactaggtgtagcaaaaagaaaacctgaatttcaagtgggtgcccatggattcccattcgacgatcaatcatgcatgaaccatctgttacgagcaatgtagggaacatgtcg

SEQ ID NO: 642 - DNA, 12175 bp, Zea mays
  source: /note="Zea mays BAC clone full insert sequence contig bacm.pk108.h15-2.fis39"
ctaatgcagacaacatttgtgattaggacagacacaagtttacaaggacaataaccatgcaaaactcaatccaagctccatggtctcaaaaaagaaaaagaaaaaagaggcacacattttttctgtacatgataagttagctcatgcacattgttttgtgtgtaggcactcttctattcagccctcttgtgtgcgcgtgagatgttgactcaagaagatggatcagctgacttaatccgtgccctgaacaatagacttattgcactgtcctttcatatcagagagtactattggcttgacatgcaaaaattgaatgagatatatcgatataaaacagaagaatattcttatgatgctgtcaacaagttcaacatttaccctgatcagatttctccatggcttgttgagtggatacctcctaagggtggttactttattggaaacctccagccagctcatatggacttccgattcttttcactgggaaatttatggtcaatagtaagcagcttggcaacaactcatcagtcgcatgccattttagaccttattgagtctaaatggtctgatttagttgcagagatgccactaaagatatgctatcctgctcttgaaaaccaggaatggaaaatcatcactgggagtgaccctaaaaacacgtgagccttagatgttttttcaatttttaccctctacctgggatcatgttgcagttcctttttacatgcttggcaatttctttttcgtacaggccttggtcataccacaatggaggatcctggccaacattactgtggcaggtttgcattctctaaactggtttcctatttctgtagatttactgtgtcttgctgttgaattggtttttatctgtccgcatgcaaggcatggtgtcattttgacacactgctgcatttagccaaacttgctgagatttactggcaatctgttcgctcgcattttgcacttctcctttatgatgcgcacattgaatgttgttgagcagtggcaaccattttgtgcagctcacagtggcatgcatcaagatgaacagaccagaacttgctgccaaagctatagaagtagctgagaggcgaatcgctactgacaaatggccggagtactacgacaccaagagagcacgattcattgggaaacagtcgcggctgtaccaaacgtggtctattgctgggttcctagtagccaagctactaatagaaaagccagacgctgctaggattctgtggaacgatgaggatgctgaaatccttaatgcttcgagcacaaacagaaaacgtggcaagaaagtgttgaagaaaacatacatcgtgtgagttctcgcagcaagttcgattaaattcctcagttagcatttttaagttgtaatataggaagtgttgtccctgtatataaacttaaatgaggttgcatttttgctggggagggtgcctgctgttggaattggatgctgttattgtcgatgcatctggctttgcaacaaatcatagacctgcctcgtagtttcgctatacactttatttggcatgacaagttttcggagtctcattaccggactgaagccatatttgaatacactaagctaacgttagctgctaaaattagctgaagacattcaaataacttaactaatattctagctagtaactgcttttagctgaatgtattcaaacacccacctataatagtccagctatctattagttgcactcataactatccattagtttaataccttggtcagttgagctaacatcagctaatagttagtcaattactagttagctagctgatttcactagcaatttttagtgacataactattagtactactgtattcaaacatgctcttaattttggaatatggatttacctcgttgctctggtttttccaggtagtatttacgaacatcttttgaaacacacgagtttgtcacaggtgctgacaacaatgttacatagcaagaccaagagttttaactaaaaatttgatatcatcttgatttagctatttttgtaaaatatataagaaacccccataaaaaggtaggctgcttccggagtctatctaaattttgccatcatatttagatcgtatttaaatgcattagaggtaatagttagctgctaaaaatttagttagagacatctaaacaatctatgtaacattttagttattagatgcttttaggtggaggcatttaaacaccctagctaagcgtccaactaactattagttattagttagccacctactagttcgtcaactaactacactagcaattttagtacatccaaacaagcccttaaaactgccatgtcctatgtccaatgtcttcattcgtcttcacgacaatcacaaataacgagccaatgtccttccacatgtagtcggctgccgtctaagagatcctttggaacataggaatttcagagaaataatacagaaattttacatgaatcaattaattttcacaagaaaagcataggaaattggaaaaaaatccagcattccaaagggccccagagtcctgaggccataggtcggttgtgctcgtccgctgatggacctcagtctaaacactagtacaatttggctctatacaagcggtaggctttttacatcacaggcggttcgattagaaaaccgtctaggatatcgcaggctattcgaaccgcatgtgatgtattagtatcacaagcggtttttttaggaccgcctgtggtgctctattcttttcacaaacggaccctaatgaaaaaccgtctgtgattgtgatttgattaccatattaatattttaatttttaacagaaatatgaaaataaaatttaaatgaattaatattttaatttttaacagaaatatgcaaatacaatttaaatgaattaatatttaatttttaacaaaatatgcaaatacaatttaaatgaattttaatagcacacatagataactagagagattttaaattaattagcaaccacaatgcatagtcgatcatacatgataacaaattgtcggcgtttcgagaccggagggtccctgggcagacgagtgaatgtcgccgcgtgccccagcccagatgggtcgagcgcgagggcgagcgcgaaggggggagatcgaggcggccggagaccggcgtgagagagctgggaatcccgcggcctccgtgttcgtcccgcgcccaggtcgggtgcgcttgcagtagggggttacaagcgtccacgcgggagagggagcgagcggcttcaagcgagcgcctgtctcgtcctcgtccccgcgcggccaaccccctctaagagggccctggtccttccttttataggcgtaaggagaggatccaggtgtacaatgggggtgtagcagagtgctacatgtctagcggaggagagctagcgccctaagtacacgccgttgtggcagccggagagattttggcacccagctggtgtgatgtcgtggccgtcggaggagcgatggagcctggcggagggacaactgtcggagcgattgagtccttgctgacgtcctcttgcttccgtaagggggctgagagccgccgtcgtcacagagtatgcgggacgccatcattgcctgtctggcggagcgagccagatgggacgccggtcttgttccctgcggcccgagtcagctcggggtagggtgatgatggcgcctcctgttgacgtggccggtctgcgtcctaggttgggtgatgtggaagcttgatgaagctgaggtgcccgatctttcggcgagtagagataattccgatttggcggatgatgacccttgcgatccgactacgacgagcaagcccgaggcgccaatgcaatcgctgaaccaactccctgtggttaccgaccttgctgatgcgagatcggcctgatcacgaagatcgtttcctgtgcacaatcgaagaacgaacaagaaaaagatgcgagcaatctaatctattactcgagggtggagttctgaatacacgaagacagcgcagatttgcgcgcgttcgagagtagctaaggctaacgtaaaacaaaactcgagaataaaggaggcgcagctcctggataaatagagggggcgcagcccctagggggcggccaaccctaggtcgtccactatgggccgcagttgggctggtcgtctatttttctgggccctcattcttcagtagcatgacgaagttaagatctctggcacgggcccgagtgattggcccagctaatgaaggaagtggcgcttgatgtggaggtgctgctggtgtagtcgtactcatagtgatgtgctcatcatcctccccttcttgaagtgaagtcgtcctcgacgacaactcctcatcctcggccatatatggtttcaaatctgcaacattaaaactagtggaaacaccaaattctgcaggcaggtcaaggatataagcattatcattaatctttgttagcaccttaaaaggaccagcagcacgaggcattaatttagaacggcgcaaagtaggaaaccgatcctttctcaagtgcaaccaaaccatatcacctggctcaaaagtaacatgttttcttcctttactaccagcaacctgattttttgcattagtagcagcaatgttctgtttcgtttgttcatgtatggtaatcatttgttcaacatgtgcagcagcatctacatgtggggcgtttgcagcattaagcgaaatcaaatcaataggtgccctagggatgtaaccataaacaatctggaaagggcacatctttgtagaagaatgcgtggcatgattgtaagcaaattcaacatgaggcaagcaatcctcccaacgtctcaaattcttgtctaaaacagccctaagcatggtagataaagttctatttactacctcagtttgtccatcagtctgagggtgacaagtagtgctaaacaacaatttagttcccaatttattccaaagagatctccaaaaatggcttagaaacttagcatcgcgatcagagactattgtttttggaataccatgtaaacgaataatttctctaaagaacaattcagcaacaatgctagcatcatcagttttatgacaaggtataaagtgagccattttagagaatctatcaacaaccacaaaaatactatccctccccttcttagttctaggcaagcccaaaacaaagtccatagagatatcaagccaaggagaagaagggacaggcaaaggcatatacaaaccatggttgttcaaccgtgacttagctttctgacaagtagtgcagcgtgcaacaaggcgctccacatcagcgcgcatccgaggccaaaagaagtgggcagccaacacctcatgcgttttgtagacgccaaaatgccccatgagaccgcctccatgcgcttcctgtaacaacaaaagacgaaccgagctagctggaacacacagcttgttagcgcgaaacaggaacccatcctgtatgtgaaatttgccccatggtatcccattaatacaatggctaaaagcatctttaaaatcagcatcgtcaacatattgatccttcacagtgtccaaaccaaagattttaaaatctaattgtgacagcatggtatagcgacgagataaagcatcagcaataacattgtccttcccgttcttgtgtttaataatgtaaggaaaggactcaatgaattcgacccatttagcatgacgacggttcagatttgtttgggtacgaatatgttttaaagcctcatgatcagaatgaattatgaactcacgatgccaaagatagtgctgccaagtatgcaaagtgcgcactaaagcgtaaagctccttatcataagtagaatatttcagactagcaccgcttaatttttcactaaaataagcaactggttttccttcttgtaacaaaacagcacctagcccaataccgctagcatcgcattcaagctcaaaaactttattaaaatcaggcaattgcaagaggggagcttgggttaacttatctttcaaagtgctgaacgctacctcctgcgaatcactccaagcaaacgacacatctttctttgtaagctcatgtagaggcgctgcaatggagctaaaatcacgaacaaatctgcggtagaaaccggcaagtccaagaaagctccgaatttgtgtgaccgtcgtcggtgtaggccactcccgaatggcagcaatcttgctgctatccacctcaatgccttgcggagtaaccacataaccaagaaacgagacacgttgcgtgcaaaatgtgcacttttccatgttaccaaacaagcgagcaacacacaaagcatcaaaaacagcacgcaaatgttcttaaatgctcctctatagacttgctgtaaataaggatatcatcggaataaacaacacaaacaaacctatgaaggcccgtaaaacttcgttcattaaacgcataaaggtgctgggagcattagtcaatccaaatggcataaccaaccattcatataaaccaaatttcgttttaaaagccgttttccattcatcaccgagtttcattctaatctgatggtaaccgctacgcaaatcaaccttagagaaaataacggcaccactaagctcatctaacatatcatcaaggtgtggaataggatatcgataacgaactgtgatgttattaatagcacgacaatctacgcacatatgccatgacccatctttctttggaacgagtaaaacaggaaccgagcaaaggctaagagactcacgaatgtaacctttatcaagcagtgtctgcacctggcgctggatctccttcgtctcatctggatttgtacggtacggggcgcggttcggaagagaagcgccggggatgagatcgatctgatgctcaatgccacggaggggaggaagacccggtggtaagtccgtaggataaacatcagcatactcctgcaaaaggttaacaacagcagggggtatatccaaagacggtgcatcatcaagcggaacaagcatgcgcgagcatacaagtgcataacagggcatatgagcttcatggagatcatcaaaatcagcacgtgtagcaagtaaaacaggagagtgcaacttgatttcagatttaataggtgcggctgatgtcgatttgacttgttgtgcagttttagcagccctagtaagatcatctttcaaaatttggtcaggggtcattggatgtataattattttctggcctttaaacatgaaagaataatgatttgaacgaccatgatgtaaactatcagtatcatattgccaaggtcgacccaataacaaagggcatgcttccataggaataacatcgcaatcagcataatcagaataagaacccagcaaaaaggggacacgtaccgaacgtgttacctttattttaccaccatcattaagccattgaatgtgatacagatgtgggtgtgtgcgagtgggcaaggataatttctctaccaacgctgtacttgccaaattgttgcagctgccactatcgatgatgatgcgaatcgaccgttcgtgcacaacgcccttggtatggaatagagtgtgtcgctgattttttcggcctgggcaacctgtgtgctgagaacacgctgcacaacaagactctcatacctatcggcgtcgatgggatcaacgtggacttcctcattttctgcatggttagtggcaatcatagcatgactagtttcctcagaatcactggctgaagagtactcaccattgtcacgtataagcaaggtacgcttgtttgggcagtcccgaatcatgtgcccaaaccctctgcaacgatggcactgaatatcccgtgtacgtcctgtggaagaagcggcgcctttggcagggggcgctactggcttggtcgtccctgtgcgcgatgtagtgctaggcgtagaaggtgcagggctggaaggagttgagctgtgtgttggaccccgacctgcaaaagagttagtatatgtctttgatcgtcgtccctgcacttcacgttcagctttgcaagcatattcaaacaatgtggttatatcaaaataatccttataatcaagtatatcctgaatttccctgttcaaaccaccacgaaaacgcgccacagcagcgtcatccgactcaaccaaaccacaacgaagcatacccttttgtaactcctggtaatattcctcaacagattgtgaaccttgttgaaaacgctgcattttgttaagcaaatcacgagcataataggaaggaacaaatctgtggcgcatgacagtttttaattgggtccaagtaatgacactgttaatgggaagtttttgtttatactcacgccaccaaattaaagcaaaatcagtaaattcactaatggcagccttcacttggctattagcaggaatatcatggcataaaaatttctgttctacctctaattcccaatcaagatatgcagcaggatcatatttaccattaaaagatggaattttaaatttaatcttagaaaataagtcattagggggatgacaaaccacacgacgtgcacgaccacggcgatctccatcgtcctgctcagtgtcaccgcctgctccatctttgtggtcaatgcatcaaggcgtgccaggatggtgtcgagtgtggtgcgagtcgccgtttgagcaaggtcaagttggttgaaacgctcggtcgtcgaagtgatcgttgaatcaagccgttcatgcatcgtcctaatgtcagcagcaagtccatcaacttgtccccttacttcctgcaactgggcatccaccatgtcgtgtgctcctgccatagttagcgtaaacaccaaaacaccaaaaggagaaaaaccgacgaaaacaggggaatggtggtgacaacttgctcgctcgatggaatgctgttatcaagttcttatacgttcttaccaagccacagtggtgaactgcaatcaacaagtggaaccggtgaaagattggatgagcgattgcgtggagaaacagaaacctgctcgtcgtagaaatatgtggagttctgggtaggctgcactctagtcaaggattagcacgatctaacaataatgcaaagttgaattatagtgcaaaacacgaaactatattgttggccacaggtgcaaaggatggatggaactagcagaatggcagtaccgtaaatattgtactagtgatgccaaaaaggcactagtagaaatcacaggtgattttgtttttcttttttgtatgatttttttgatatttttctcagcacaagaagcaacaagataggagctacacgaagtttcacctaaaacagatatcagatgtggtctatagaaaatcaggaagttctctgaaaagcgttcgagaactttgatgaatttttttctttattttccagaatttttttgacaattttgtcgaaccccaaacagaccgtaggtgagtttggccggcctcagaatggtgtcaacaatctcctgtaaaaatttcagattttttggacacccgagcgaaaagttatgcccgttttacggaaggtacctcaagttatgttttaaaaacgaccaggatgaaacaaccgtatcctttctccttcgttttctttttttttgtttctgtttttttacgtaaccgaaggagaaaaacaaggaagcggtcgttgactcggtttgttttttttctgtttttttttcgtaaccgaaggagaaaatcaaggaaacggccgttgactcggtttgttttttctgtttttttacgtaaccgaaggagaaaaacaaggaaacgatgttgactcggtttgtggcgtgatcaaacgggagatggtggcggcgctagggtttgaatggtggaagaacacaatgcaaccaacaacaaatgacgcgaaagcacacaaattcaacaatgcagattattgaaagaaagtgcgaggttcaaaagggtgctgggataagatctaacctgaatttttatgtggttttgtggactgtaggaaaaaaaacactcgataaactcaccgatcaacctggaaatctgataccaattgatgtagctgaggtgcccgatctttcggcgagtagagataatttcgatttggcggaagatgacccttgcgatccgactacgacgagcaagcctgaggcgccaatgcaatcgctgaaccaactccctgtggttaccgaccttgctgatgcgagatcggcctgatcacgaagattgtttcctgtgcgcaatcgaagaacgaacaagaaaaagatgcgagcaatctaatctattactcgagggtggagttctgaatacacgaagacagtgcagatttgcgcgtgttcgagagtagctaaggctaacgtaaaacaaaactcgaaaataaaggaggcgcagctcctggataaatagagggggcgcagcccctaggggcggccaaccctaggtcgtccattatgggccgcagttgggctggtcgtctattcttctgggccctcattcttcagtagtatgacgaagttaagatctctggcacgggcccgagtgattggcccagctaatgaaggaagtggcgcttgatgtggaggtgctgctggtgtagtcgtactcatagtgatgtcctcatcagagtactcatcagccagcgatttagataatgatacatatgccatgcttgctgcccaagatgctgaaaaggagaatgatgatgaagagcatattggggctgaacatgctgaacactatgagagcctcgttgtaagatgtgtcttgagtgctcaaattattaaagctgaacaaaaccagcgacacaattgttccaaactaaatgtgtagttttggaacgatcttgtcgtattataattgatggaggaagctgcaacaacttagcaagcaccaccatggtagagaagcttgggctgaaaacgcttccacatccacacccctactacatccaatggttcaacgatagtggtaagcttaaggtaacacgtatggtccgtgtggaatttacaattggttcataccatgattatattgattgtgatgtggtacccatgcaagcttgctctatgttatttggtagaccatggcaatttgataaggacaccgtgcatcatggtaaaacaaatcaatactcttttatgcataatgagaagaagcttgttttgcaccctatgtcccccgatgctatcttgaaagatgaagttgctagagcatgcaaagagaaaaacaaatctgttcataataacaatctagatgttacaaaggaattggtacaacctaagagtgataattctaaatctgctcatgtaaggaaaaatgaaatacaactgaaaagtgcttgtttccttgcttccaaatctgatttacttgaattaaacgatgttgatgcaatctgctatgtgtttatatgcaaggatgctttgttctcacttcacaacataccatctactttgccttctactatcactaatcttttgcaggactatgctgatgtatttccaaaagaagtgccacctgggctgccaccgataagaggaattggacatcagattgacctcatcccaggggcttccttgccaaaccgagcgccatacaggacgaacccagaagaaaccaaggagattcagcgataagtacaagaattgctcgataaaggttatgtgcgtgagtcccttagtccttgctctgtccctgttttactagtcccaaagaaagatggctcatggcgcatgtgtgtagattgtcgagcaattaataacattaccatcaggtatcgtcatcctatccctaggttagatgatatgctggatgaacttagtggctcgatggttttctctaagattgacttacgtagtggatatcaccaaattcgcatgaagctaggagatgaatggaaaacagcatttaaaaccaagtttggtttgtacgagtggttagtcatgccttttggtcttactaatgcacctagtactttcatgagattaatgaatgaggttttacgtgctttcattggaagatttgtggttgtctactttgatgacatcttgatctatagcaaatgtctagtagatcatcttaatcatctacgtgctgtttttaatgctttacgtgaagcacacttatttggtaaccttgataagtgcacattttgcacagaccgtgtctcttttcttggctatgttgtgacaccacagggaattgaagttga

SEQ ID NO: 643 - DNA, 9602 bp, Zea mays
  VARIATION (8728)..(8728): /replace="c" or "g" or "t"
  misc_feature (8728): /note="Nucleotide given in the sequence has no preference with respect to those in the annotation for said position"
  source: /note="Zea mays BAC clone full insert sequence contig bacm.pk108.h15-2.fis40"
tgtataattattttctaacccttaaaaatgaaagaataatgattcgaacgaccatgatgcaagctatcagtatcatattgccaaggtcgaccaagtaacaaagagcatgcttccatgggaataacatcacaatcaacaaaatcagaataagcacccatggagaaaggaactcgcacggaacgcgtgatttttattttaccaccatcattaagccattgaatgtgatatgggtttggatgcttacgagtgggtaacgacaacttttcgaccagcatggtactcgccaaattgttgcaactgccgctgtcgataatgatgcgaattgaccgctcctgcacaacaccctttgtatggaacagagtgtgtcgctgattcttctcgggcaaagcgacctgtgtactgagaacacgctgcacaacaagactttcatacctatcagcgtcgcccgggttgacatgtacctccgccttagctgcatggtcagtggcaagtagtgcatgttcaatttcttcagaatcactagcggaagagtactcaccatcgtcacgaatgagtaaagtgcgcttgtttgggcagtcccgaatcacatggccaaatcctctacagcgatgacactgaatatcccgtgtacgacctgtgggtggggcagcgctggctggtttggtcgtcttctcgcgtggagtagtggtggacgtggatggcgcagggggaactggtgctgaggtggatgtcgagcttcgtcctgcaaaagggttagaatattgcttcgagcggcgtccctgcacttcacgttcagctttgcaagcatattcaaataaagtagtcatatcataatattccttataatcaagtatatcttggatttcgcggtttaaaccaccacgaaaacgtgccatagcagcgtcgttgtcctccaatatcccacaacgaatcatacctttttgtaactcctggaaatagtcctcaacagattgagaaccttgctgaaaacgctgcattttattaagcaaatcacgagcataatacgaaggcacaaatcgatgtcgcatcgcagctttcaactgatcccaagtggttggaatggtagtgggatgttttattttaaactcacgccaccaaattaaagcaaaatcagtaaattcactaatagcagctttaacctgaaaatgtgcagcaatatcatggcatgaaaatttttgttcaacctctaactcccaatcaagatatgcagcaggatcatatttgccattaaaaggtggaattttaaatttaatcttagaaaataagtcattagggggatgacgaaccacacggcgtgcacgaccacggcgatctccatcgtcccactcagtgtcaccgccgtagtcctgctccatctttgtggtcaacgcatcaaggcgtgccaggatggtgtcgagtgtggtgcgagtcgccgtttgagcaaggtcaagctggttgaaacgctcggtcgtcgaagtgaccgttgaatcaagccgttcatgcatcatcctaatgtcatcagcaagtccatcaacttgtccctttacttccagcaactgggcatccaccgtgtcatgtgctcctgccatagttagcgcaaacaccaaaaaaacgacaaaaacaggggtgtactgctcacaaggcgctcacactagtgctgttatcaaattcttatccgttcttaccaagccacagtggtgaactgcaaccaacaggtggaaccggtgaaagattggatgagcgattgcctggagaaacagaaacctactcgtcgtagaaatatgtggagttctgggtaggctgcactcaagtcaaggattagcacgaccaaacaataatgcaaagttgaattatagtgcaaaacacgaaactatattgctggccacaagtgcaaaggacggatggaactagcagaatggcagtaccgtaaatattgtactagcgagaccactagtaggaatcacaagtgattttgtttttcttttttgtatgatttttttgatatttttctcagcacaagaagcaacaaaataggagctacacgaagtttcacctaaaacagagttcaaatgtggtctacagaaaatcagaaagttctctgaaaagcgtgcgagaactttgacggatttttttctttattttcctgaatttttttgacaattttgtcgaacccaaacagaccgaaggtgagtttggccggcctcagaatggtgtcatctagctcctgtaaaaatttcagatttttcggacacccgagcgaaaagttatgcccggtttaaggaaggtacctcaagttatgttttcaaacgaccgggatgaaacaaccgtatcctttctccttcgttgttttttttgtttctgttttttttttgacgtaaccgaaggagaaaaacaaggaaacgatgttgcctcggtttttttttctgttttttttcgtaaccgaaggagaaaaacaaggaaacggacgttgactcggtttgttttttctgttttttttttgacgtaaccgaaggagaaaaacaaggaaacaatgttgactcggtttgtggcgtgatcaaaggggagatggtggcccagctaatgaaggaagtggcacgggctcgagtgctgctggtgtcgtactcatagtgatgtcctcatcatcctccccttcttgaagtgaagtcgtcctcgacgacaactcctcatcctcggccatatatggtttcaaatctgcaacattaaaactagtggaaacaccaaattccgcaggcaggtcaaggatataagcattattattaatctttgttagcaccttaaaaggaccagcagcacgaggcattaatttagaactacgcaaagtaggaaaccgatcctttctcaagtgcaaccaaaccatatcacctggctcaaaagtaacatgttttcttcctttactaccagcaacctgatttttagcattagtagcagcaatgttctgtttcgtttgttcatgtatggtaatcatttgttcaacatgtgcagcagcatctacatgtggggcgttcgcagcattaagtgaaatcaaatcaataggtgccctagggatgtaaccataaacaatctggaaagggcacatctttgtagaagaatgcgtggcatgattgtaagcaaattcaacatgaggcaagcaatcctcccaacgtctcaaattcttgtctaaaacagccctaagcatggtagataaagttctatttactacctcagtttgtccatcagtctgagggtgacaagtagtgctaaacaacaatttagttcccaatttattccaaagagatctccaaaaatggcttagaaacttagcatcgcgatcagagactattgtttttggaataccatgtaaacgaataatttctctaaagaacaattcagcaacaatgctagcatcatcagttttatgacaaggtataaagtgagccattttagagaatctatcaacaaccacaaaaatactatccctccccttcttagttctaggcaagcccaaaacaaagtccatagagatatcaagccaaggagaagaagggacaggcaaaggcatatacaaaccatggttgttcaaccgtgacttagctttctgacaagtagtgcagcgtgcaacaaggcgctccacatcagcgcgcatccgaggccaaaagaaatgggcagccaacacctcatgcgttttgtagacgccaaaatgccccatgagaccgcctccatgcgcttcctgtaacaacaaaagacgaaccgagctagctggaacacacagcttgttagcgcgaaacaggaacccatcctgtatgtgaaatttgccccatggtatcccattaatacaatggccgaaagcatctttaaaatcagcatcgtcaacatattgatccttcatagtgtccaaaccaaagattttaaaatctaattgtgacagcatggtatagcgacgagacaaagcatcagcaataacattgtccttcccgttcttgtgtttaataatgtaaggaaaggactcaatgaattcgacccatttagcatgacgacggttcagatttgtttgggtacgaatatgttttaaagcctcatgatcagaataaattatgaactcacgatgccaaagatagtgctgccaagtatgcaaagtgcgcactaaagcgtaaagctccttatcataagtagaatatttcagactagcaccgcttaatttttcactaaaataagcaactggttttccttcttgtaacaaaacagcacctagcccaataccgctagcatcgcattcaagctcaaaaactttattaaaatcaggcaattgcaagaggggagcttgggttaacttatctttcaaagtgcttaacgctacctcctgcgaatcactccaagcaaacggcacatctttctttgtaagctcatgtagaggcgctgcaatggagctaaaatcacgaacaaatctgcggtagaaaccggcaagtccaagaaagctccgaatttgtgtgaccgtcgtcggtgtaggccactcccgaatggcagcaatcttgctgctatccacctcaatgccctgcggagtaaccacataaccaagaaacgagacacgttgcgtgcaaaatgtgcacttttccatgttaccaaacaagcgagcagcacgcaaagcgtcaaaaacagcacgcaaatgttctaaatgctcctctatagacttgctgtaaataaggatatcatcgaaataaacaacaacaaacaaacctatgaaggcccgtagaacttcgttcattaaacgcataaaggtgctgggagcattagtcaatccaaatggcataaccaaccattcatataaaccaaattttgttttaaaagccgttttccattcatcaccgagtttcattctaatctgatggtaaccgctacgcaaatcaaccttagagaaaataacggcaccactaagctcatctagcatatcatcaaggcgtggaataggatatcgataacgaactgtgatgttattaatagcacgacaatctacgcacatacgccatgacccatctttctttggaacgagtaaaacaggaaccgagcaagggctaagagactcacgaatgtaacccttatcaagcagcgtctgcacctggcgctggatctccttcgtctcatctggatttgtacggtacggggcgcggttcggaagagaagcgccggggatgagatcgatctgatgctcaatgccacggaggggagggagacccggtggtaagtccataggataaacatcagcatactcctgcaaaaggttaacaacagcagggggtatatccaaagacggtgcatcatcaagcggaacaagcattcgcgagcatacaagtgcataacagggcatatgagcttcatggagatcatcaaaatcagcacgtgtagcaagtaaaacaggagagtgcaacttgatttcagatttaataggtgcggctgatgtcgatttgacttgttgtgcagttttagcagccctagtaagatcatctttcaaaatttggtcaggggtcattggatgtataattattttctggcctttaaacatgaaagaataatgatttgaacgaccatgatgtaaactatcagtatcatattgccaaggtcgacctaataacaaagagcatgcttccataggaataacatcgcaatcagcataatcagaataagaacccagcgaaaaggggacacgtaccgaacgtgttacctttattttaccaccatcattaagccattgaatgtgatacggatgtggatgtgtgcgagtgggcaaggataatttctctaccaacgctgtacttgccaaattgttgcagctgccactatcgatgatgatgcgaatcgactgttcgtgcacgacgcccttggtatggaatagagtgtgtcgctgatttttttcggcctgggcaacctgtgtgctgagaacacgctgcacaacaagactctcatacctatcggcgtcgatgggatcaacgtggacttcctcattttctgcatggttagtggcaatcatagcatgactagtttcctcagaatcactggctgaagagtactcaccattgtcacgtataagcaaggtacgcttgtttgggcagtcccgaatcatgtgcccaaaccctctgcaacgatggcactgaatatcccgtgtacgtcctgtggaagaagcggcgcctttggcagggggcgccactggcttggccggccctgtgcgcgatgtagtgctaggcgtaggaggtgcagggctggaaggagttgagctgtgtgttggaccccagcctgcaaaagagttagtatatgtctttgatcgtcgtccctgcacttcacgttcagctttgcaagcatattaaaacaatgtggttatatcaaaataatccttataatcaagtatatcctgaatttccctgttcaaaccaccacgaaaacgcgccatagcagcgtcatctgactcaaccaaaccacaacgaagcatacccttttgtaactcctggtaatattcctcaacagattgtgaaccttgttgaaaacgctgcattttgttaagcaaatcacgagcataataggaaggaacaaatctgtggcgcatggcagtttttaattgggtccaagtaatgacactgttaatgggaagtttttgtttatactcacgccaccaaattaaagcaaaatcagtaaattcactaatggcagccttcacttggctattagcaggaatatcatggcatgaaaatttctgttctacctccaattcctaatcaagatatgcagcaggatcatatttaccattaaaagatggaattttaaatttaatcttagaaaataagtcattagggggatgacgaaccacacgacgtgcacgaccacggcgatctccatcgtcctgctcagtgtcaccgccgtattcctgctccatctttgtggtcaatgcatcaaggcgtgccaggatggtgtcgagtgtggtgcgagtcgccgtttgagcaaggtcaagttggttgaaacgctcggtcgtcgaagtgaccgttgaatcaagtcgttcatgcatcgttctaatgtcagcagcaagtccatcaacttgtcccctgacttcctgcaactgggcatccaccatgtcgtgtgctcctgccatagttagcgcaaacaccaaaacaccaaaaggagaaaaaaaccaacgacaaaaacaggggtgtactgctcacaaggcgctcacactagtgctgttatcaagttcttatccgttcttaccaagccacagtggtgaactgcaaccaacaggtggaaccggtgaaagattggatgagcgattgcctagagaaacagaaaccttctcgtcgtagaaatatgtggagttttgggtaggctgcactcaagtcaaggattagcacgatcaaacaataatgcaaagttgaattatagtgcaaaacacgaaactatattgctggccacaggtgcaaaggatggatggaactagcagaatggcagtaccgtaaatattgtactagtgatgccaaaaaggcactagtagaaaacacaggtgattttgtttttcttttttgtatgatttttttgatatttttctcagcaaaagaagcaacaagataggagctacacgaagtttcacctaaaacagatatcagatgtggtctatagaaaatcaggaagttctctgaaaagcgtgcgagaactttgacgaatttttttctttattttcctgaatttttttgataattttgtcgaaaccaaacagacaattttgtcgaaaccaaacagggctcagaatggtgtcaacaagctcctgtaaaaatttcagattttttggacacccgagcgaaaagttatgcccggtttacggaaggtacctcaagttatgttttaaaaacgaccgggatgaaacaaccgtatcctttctccttcgttttctttttttttgtttctgttttttttatgtaaccgaaggagaaaaacaaggaagcggtcgttgactcggtttgtttttttttctgttttttttgtaaccgaaggagaaaatcaaggaaacggccgttgactcggtttgtttttttctgtttttttttgacgtaaccgaaggagaaaaataaggaaacaatgttgactcgatttgtggcgtgatcaaacgggagatggtggcggcgctagggtttgaatggtggaagaacacaatgcaaccagcaacaaatgacgcgaaagcacacaaattcaacaatgcagattatggaaagaaagtgcgaggctcaaaaggtgctgggataagatctaacctgaattttaatgtggttttgtggactgtaggaaaaaaaacgctcaataaactcaccgatcaacctggaaatctgataccaattgatgaagctgaggtgcccgatctttcggcgagtagagataattccgatttggcggaagatgacccttgcgatccgactacgacgagcaagcccgaggcgccaatgcaatcgctgaaccaactccctgtggttaccgaccttgctgatgcgagatcggcctgatcacgaagatcgtttcctgtgcgcaatcgaagaacgaacaagaaaaagatgcgagcaatctaatctattactcgagggtggagttctgaatacacgaagacagcgcagatttgcgcgcgttcgagagtagctaaggctaacgtaaaacaaaactcgagaataaaggaggcgcagctcctggataaaatagagggggcgcagcaccctaggggcggccaaccctaggtcgtccactatgggccgcagttgggctggtcgtctattcttctgggccctcattcttcagtagcatgacgaagttaagatctctggcacgggcccgagtgattggcccagctaatgaaggaagtggcgcttgatgtggaggtgctgctggtgtagtcgtactcatagtgatgtcctcatcaaagctcctccgaagccgaggtcgagtctgtcttccgtggctgaggtcgagtccgagcccctgggtcgggcgaggcggaggccgccggctgaggccagggcggagtccgagccctggggtcgggcggagcggagttcgccgtcttctagggcttagcccaagtccgagccctgggtcgggcggagcggagttcgccgtcttccgagacttagcccgagtccgagccctgggtcgggcggagcggagttcgccgtcttccgggacttagcccgtgtccgagccctgggtcgggcgaagcggagtttcctatggtgccttcggcagggcctgaccgcctgtcagtctcactctgtcaagtggcaccgcagtcggagtggcgcaggcggcgctgtccttctgtcaggccggtcagtggagcggcgaagtgacgacggtcacttcggctctgccggctggggggcgcgcgtcaggataaaggtgtcaggccacctttgcattaaatgctcctgcgatttggtcggtcggtgcggcgatttggtcagggttgcttcttggcgaagacagggcctcgggcgagccggaaatatgttcgccgctggaggggggcctcgggcgagacggaaaccctccggggtcggctgcccttgtccgaggctaggctcgggcgagcg

SEQ ID NO: 644 - DNA, 9646 bp, Zea mays
  source: /note="Zea mays BAC clone full insert sequence bacm.pk108.h15-2.fis41"
ttaaaataaaacgcgaggtcgacggtatcgtttccccttgatcaccttgacacggggcgactcatgcttggtgaagcggttcagataatcaacaggcgagacttagtgctcgaaaataaggaaaaacacggctccgtgccgaaattacatacatgttcaggcctcgacagccacaatgaacaaaaaacactggcattcgaagtgccattacaaacggaactccggttcccctccgcaggtacgaacaaccccactccgagggggaaggcctgcggagcaacagaagaatgatgagcggctcgctgccgcccgttctaaccatgacgacaaccacccccgccccgggcagcgaagcggcttaggcagcggcttcggggcaggtgccacgacaggagggctctcccccgctgaggacgagaaccagccattcaggccgggaggcggagacccagggccactggcgccctacctgtcccgacatggctggaggaagtccccatgggactcaaggacgccattctcccccaggcatggggagaagaaaaaggcagccgactcatgcgggggcagccccctgactcgcctcatcttccatcttggcctggatgacgaaaatccttgaggccgagggaggagtagaggccgcagcctggcccgctttccccaccgtcgaactggaggtcaccatcttgggtgaccgccggtggcggggtgcggccaggctgcgtgatgaaaatccttgaagccgaacgatggctgagaggtaccaactcccatggagttgcgttcctccaacgaggaggcggaaaggcggcggataccccccatccgggggcttggaagatggaaagacacgacgcataagggaggaagaaaacatggttgccttctgaaaggagtctccctccttttaaaggcaactctccctacgtgcgcccccagacgccacgagctgagtcttctccaacacgctccaaggccctcccctgcggctcggggggctgggtcccgcatgtcatgcaaaccggctcagagtagaagaagccaaaccgccgcgcgtggtgcgcacaaccgcccagcggttacaagcgaccccccacttttgcccagaccaacgggcggaaggggcgggcagccatgcaggcggcatgcaaccgcgccaggtggacgcgcttctccgacttctgacacgccagcttggaggcccaggcccacgcgtcaagcaaccggcgcgccagttgctgcatgcaagcaaccgcaccgccacttgtgccaccgtcgcacctcttcgattgcggagcctgtgccgcgactcgaggcgacccagcgcgcgacccagcagcgccagcctggcgcgttggtcaaagcggccgaaagtgggccggcagtaatggcggtggcaggcgggcgggcgcagcagtcacgtcgtcagccaggctcacgtcccatcctgggacagcaagagagcctcctcccacggcgtgaagacggtgcacccgtgatccgttcctcgaacggctcgcgcacgcgtaacggccgccccgccaaccactcgccccgtcgcattaactccgcggcgggacgggcggcgattctggcaggagaagcggacgacgcttcgccttcgccgcaataaccgcgtcaaaaaaggtacgccacgtcgtttgatttcgtatccttttcctttttcctctttctctatctcttgcaatagggaccgggaaagggggataccccgaaaaggatccttctctgcgaaggaaccgggctccgagcccctccctactgatcagaggttcgaagactggccctccgaagggttcaacagtcgcctcagatcgcgtgggcccgacacccactactggtcaggggttcgaaggccagccccccgaagggttccatggccgcctcaggctactcaggctccgcgcccactactgatcaggggttcgaaggctggcccccaaagggttcacagtcgccttagacaccgagcgagggatgaccaggggtacgttcgatacataaccgaggctcgggctgcgctcccgaggtaccctaggacatttccgagaccagcgggagcgatcttgtaacggaatcccatcggagggaggcatcgagccctcggaccccgtcgccaggggaccgggtccggcaaatcacccgcaggtacttttgggcgtgcctctgggcccctagccgacccccaacgaacggggcacggacgtccactcggattacccgcttgcagctcaccggagacaccatgttcggtgcccatcgagggtaacatggcgcactcccccccctcctccttgtggaaaggcgacgtaggggcgtatgtaaaaaagccgagtctgtccctgatcgtcctctcgccctgtgcagaggctcgggggctgctctcgcaaacccggctccggccaaaccgttgacagcgtcaacataccagcccgagagcttgggccccgaccgtgcacccgggctacggccagttcgcatgagggaacgaccagaccagccgaagcattacgcaaggcattaagacctcgaaggagtgtaaccactcctccgaggcctcgggggctacaccccggcgggtgcgctcgcgcgcacccaccggaacgaaatgcaaccgagaaaggctggtccccttgcaaaaaagtgcgacggaagcctccaagcgagtgctatcactcccttcgaggctcgggggctactgtcggggaccataattaggggtaccctcaagacgcctaattctcagctggtaacccccatcagcataaagctgcaaaggcctgatgatgtgcacccgttgggtgattgcccgatctttcgatgagagggtgtggaataactcgattgggggaggagacgacgttcacggcccgactacagccttccaaagacgctgcgccttagcaaccgatacaccacctcctatggctgtcacgatcttgtggagcgtgacaccctggccactagggcactcgtcctgcaagcaatcgaagaactagcaagaacaagtagaacaagtactgaattaccagatctaaatgtaggtttaaagatcaaactacaatatggtggggttccgaagacaagaagacgggcggctgaactagcacgcgcgcttgcaagcaagtagcgagagctaaacttgatctaaacaaaacccgctgttcttggtggcggctagggggtttataaacatgggaggacgaccacaagggtattggggtcgtgctgcaaccctaggatgcgtccctaatggacctaacttgatacacgacccattgggccaaaatagggtgacgcagcaccatgggcagaaaaggcaggaaatgtctcggtaagaaaacaatgattacggcggcctcagaacagatatgactataattccggatccatatgaaagtagacttgataagctttccatgttgtgcttgaacattccaatccgagcccgcatctgaccgtggtgaccgtcacaagttggtgttcttctgcagtccgaatccagcatgttcaaatccttttccctttcggtcttctccctgattcctaagcaaaacaagagtgcacgggtctccatggtctaaatatgatggacatgaactcaagagtgtaatcacctgatggttgagttgacgagcacgagcgcgagtaatgggaccagaaattggtacttgtattggtatagatgcatcagtagtgtggatgtcttcatcattctccccttcttgcatttgagtcgtcctcgactcaagctcaacttcctctcccaagtagggctttaaatctgcaatgttaaatgtggggctaaccccaaagtctgcaggcagatctagcctatatgcattgtcgttaattttctctagcactttaaacggtccatcggctcgaggcaacaatttagattttcgtaattcaggaaacctttcctttctcaaatgcaaccaaactaaatctccaggttcaaaatttatttcctttctacctttatcactagcaaacttatatctagcattcatacgctctatgttttctttagtagtttcgtgcagttttaacatcaattcagcacgcctagtagcatcaaaatttagtttttcagaagatggcaaaggcattaaatcaataggagcacgaggtaacaaaccatatacaatctgaaatgggcacatctttgtagtagaatgcaatgatcgattataagcaaattcaatatgaggcaaacagtcctcccacatcttaatattcttctttagaactgcccttaacatagtagacaaagttctattcacaacttcagtttgaccatcagtttgaggatgacatgtagtagaaaataaaagcttagtccccaattttgcccacaaagtcctccaaaaatgactaagaaatttagcatcacgatcagaaacgattgtgttgggcacaccatgcaagcgaacaatttcacgaaagaacaaatcagcaatatgagtagcatcgtcagttttatgacatggtatgaaatgtgccatcttagaaaatctatcaacaaccacaaacacactatcacgtcccttcctagtcctaggcaatcccagcacaaaatccatagaaatatcttcccaaggagcactaggaacgggtagaggcaaatacaaaccgtgtggatttaaccgtgacttcgccttttggcatgtcgtgcaacgagcaaccaatctcaccacatctcttctcatcttgggccaaaagaaatgaccagcaagtatgtcctccgttttctttgctccaaaatgtcccattaagccacctccatgtgcttcctgtaacaacaacaaacgaacggagctagctggaatgcatagcttgttagctctaaacacaaacccatcactaacgatatatttgttccatcctttcccatctttacaatgcagcaacacatctttaaaatcagcatcatgaacatattggtctttaatcgtctctaatccaaagattttgtagtcaagttgattcagcaaagtatatctcctagacaaagcgtcagcaatgatattctcttttcctttcttgtgcttaataacataaggaaacgattcgataaattcaacccacttagcatgtctacggttcagttttccttgactacgaatatgtttcaaagattcatgatcagaatgaataacaaactctttgggccacaaataatgctgccatgtttctaatgttcgcacaagagcatataattccttatcataagtagaataatttagaacagacccactcaatttttcactaaaatatgcaacaggtttgccttcttgtaacaaaacaccacccaatccaattccactagcatcacattcaagctcaaaagtcttattaaaatcaggaagttggaggagaggtgcatgtgtcaacttatctttcagcacgttgaaagcgtgctcttgtactttgccccaactaaaatgcactcccttcttcgtaagctcattcaaaggtgcagcaatggtgctaaagtccttcacaaaacggcgatagaagccagcaagtcctaggaaactccgcacctgtgtgatagtctttggcataggccatccatgtatcgcttctaccttggcttgatcaacctcaattccctgtggagtcacaacataaccaagaaacgaaactcgatcggtgcaaaatgtgcacttcccaaggttaccaaataaacgtgcatctcgtaaagcattaaaaacagcacgcatgtgatcaacatgttcatccatagatttgctgtagatcaatatgtcatcaaagtatactaccacaaattttccaatgaaggcacgcaaaacctcgttcattaatctcatgaaagtgctaggtgcattagttaacccaaaaggcatgactaaccactcatacaatccgaacttagttttgaaagcagttttccattcatctcccaatttcatacgaatctggtggtacccactacgcaaatcaactttagaaaacacaatggcaccactcaattcatcaagcatatcatctaaacgtggaatagggtgtcgataacgtatcgtgatattattaatagccctacaatcaacacacatacgccatgttccatcttttttaggcactaaaataaccggaacagcacacggactaagagactcacgcacgtaacctttgtcgagtagttcttgcacttgtcgctgaatttcttttgtttcctctggatttgtcctatatggcgcacgattcggcaaagatgcaccaggaataagatcaatttggtgctcaatccctcgtataggtggcagcccctctggtatctcacttggaaatacatcagaatactcctgcaaaatgttagtaataacaggaggcaaagaatgctgcatatcttgaattgaaatcaaagcatccttgcataccaaggcgtaggcaacagtagtggaagcaaataattcattaacatcagtttttgttgcaagcaagcaatgtcctttcaattttatcccatctttgttattaccaacaactttaatattcttgttgttctcagttttagctttggtagctttagcaacatcatcacgcacaatagcctcaggggacatgggaagcaaaataattttcttatcatggtatatgagagaatattgatttgatctaccatgatgcatacaatctgaatcaaattgccatggtctacctagcagaatattacaagcatccataggcacaacatcacagtcaacaacatcacgatatgaaccaatagcaaaattaattcgtaccagcttggttaccttgaccttaccactattgttgagccattgaatgtgatatggatgcgggtgcggtttggtcgtaagtgcaagcttctccaccatgtcgctgctagccaagttgttgcagctacctccatcaatgatcaaacgacatgaacgctccttaatgacacactttgtttgaaacaacgtatgtcgctgattctgctctgccttctccatttgtgcactaagcacacgctgtacaatgaggctctcataatgctctgcatcatctgcaccaatctgttcttcgggtggttccttagtgcctacatcatcagccgcaagcaaagcaagtgtagcttcatccaaatcactagcagaggaatacccaccatcgtcttttaccaccaaaacatgctgattaggacaataacgctgcacgtgtccatagcccttgcatcgataacacagaacatctcttgttctacctgtggaagctactgaagaggcactacctgcgggtttctgggcagatttggttgctgaatttgtggaagatgcacgtggtttgtcgctggaggaaggcgggggtgctggtcgacttggcgagggagttggtgctagtgtacggccggtcatggatgtagtcgtgcgctgttgccatggtgtagattttcctgcagaaacattagaccttgcactagcacgtcgtccctgcacttccctttcagctttgcaagcaagatgaaacaatcgggttacattagcataatctttataagcaaggatgtcctgaatttccctatttaacccgcccaaaaatctagccatagcagattcctcaccctcctctatgttacaacgcagcatacccatttgtaattcctgataatattcttctacacttttagtaccctgtctcaattgttgcaacttgtttaacatatcacgtgcataataagaaggaacaaatctagcccgcatgacccgtttcaacgcatcccaagtttgtggcatgttattaggattcttcttaccatgttctatccaccaaacagaagcaaattcagtaaactcactagtagcagctctaacccgcgcattctcaggaaattcatggcatgcaaacttttgatcaaccgcaatctcccaagtaatgtaagcatcagggtcatatttaccatcaaaaggaggtattttaaatttaaccttactaaaagcatcatcattaccatgtacctcacgtcggcgaaaaccacccatacctctacggttagtacgtagtcgccggcgattaggtgcttcttggtcatcttgttcagtatcagcaacatagtcatcccagttaccttcggcgccttcatcacgcccaccattgatattagcatgcatctcatcaaaccgcctcaagagtgcgacaaggctcttgtcaatatgagcaactgtcatttccacatttgcaagtttggtgttcgtgtcgatctgtgtggcctccaattgccccatcttttcattcgtcacctgcatgtcattatcaagaccttccgtgtgcgtcttcaccagccttacaaagtgttgtatgatacccttggtgcgaggagagtgtggcatattacgagaagcatcatcaacctccaatcctgccatggttagacgaacagaggcaacaagaaaaaaaacgtgaaggaatgaaaactctacaactattaggatgtagctactgcaaggcgctcactctcaacctgccacacaagctcttaccaattcttaccttgcacaacaggaggggtcagcaaccaacaagtctgcaaccgtggaataagtgtattggtgccgcagcaacacgacctgtcaaactgtagtcgaaatatgtagagttgtaggtgggctgaagcaaggaatacactagtaccacgttagttacaaaagcaagctgaataatcgttcaacggtggtactgtgctggtcctaggctaaaccaggctagagacgtgagcctaggcacaaaggtagtcactgaaaaagaacaactagcacagcacaaagagaattaacagattaagagattcagcccccttcttcttcttttgcttttttttcttttctattcttttttttcttcttcttcttctgttttttttgcaggggcctaaacccttttttttactatgacaacccaaacaataaagatattgctaacagcccctttaaatcagatttaacaaatcttgttaatatagaaagtccagaaatctctacgatgattgcggagcgctcagaacgaattttgagataaggtcagatccgttggaaagaagataagataagctttccagattgtatttaaacttccaaatcggatatgatatgtatccgtggtggcaaaaacgaaccagagatgtttttggtgatggtggatctcgtggtgaccaaaacgtggtagaactcaaaactctaaaggaataaactaagaccagcaactcgacacaaccgatgcaaccaaaaactcaacaagccctaactaagtagtactagtaaatgctcaatggtttataggattgcggtaaaactaatctactattttttggctttttctggactataggagataagaaaacagcgaagaaaagtaaatctctcaccgataaaccttgctttgataccaactgatgtgcacccgttgggtgattgcccgatctttcgatgagagggtgtggaataactcgattgggggaggagacgacgttcacggcccgactacagccttccaaagacgctgcgccttagcaaccgatacaccacctcctatggctgtcacgatcttgtggagcgtgacaccctggccactagggcactcgtcctgcaag

SEQ ID NO: 645 - DNA, 12541 bp, Zea mays
  source: /note="Zea mays BAC clone full insert sequence contig bacm.pk108.h15-2.fis42"
tcacttgtgattcctactagtggcctcgctagtacaatatttacggactgccattctgctagttccatccgtcctttgcacttgtggccagcaatatagtttcgtgatttgcactataattcaactttgcattattgtttgatcgtgctaatccttgacttgagtgcagcctacccaaaactccacatatttctacgacgagaaggtttctgtttatccaggcaatcgctcatccaatctttcaccggttccacctgttggttgcagttcaccactgtggcttggtaagaacggataagaacttgataacagcactagtgtgagcgccttgtgagcaatacacccctgtttttgtcgtttgtttttctccttttggtgttttggtgttgcgctaactatggcaggagcacacgacatggtggatgcccagttgcaggaagtaaggggacaagttgatggacttgctgcggacattaggacgatgcatgaacggcttgattcaacgatcacttcgacgaccgagcgtttcaaccaacttgaccttgctcaaacggcgactcgcaccacactcgacaccatcctggcacgccttgatgcattgaccacaaagatggagcaggaatacggcggtgacactgagcaggacgatggagatcgccgtggtcgtgcacgtcgtgtggttcgtcatccccctaatgacttattttctaagattaaatttaaaattccatcttttaatggtaaatatgatcctgctgcatatcttgattgggaattggaggtagaacagaaattttcatgccatgatattcctggtaatagccaagtgaaggctgccattagtgaatttactgattttgctttaatttggtggcgtgagtataaacaaaaacttcccattaacagtgtcattacttggacccaattaaaaactgccatgcgccacagatttgttccttcctattatgctcgtgatttgcttaacaaaatgcagcgttttcaacaaggttcactatctgttgaggaatattaccaggagttacaaaagggtatgcttcgttgtggtttggttgagtcggatgacgctgctatggcgcgttttcgtggtggtttgaacagagaaattcaggatatacttgattataaggattattttgatataaccacattgtttgaatatgcttgcaaagctgaacgtgaagtgcagggacgacgatcaaagacatatactaactcttttgcaggtcagggtccaacacacagctcaactccttccagccctgcaccttctacgcctagcactacatcgcgcatagggacgaccaagccagtggcgccccctgcaaaaggcgccgcttcttccacaggatgtacacgggatattcagtgccatcgttgcagagggtttgggcacatgatttgggactgcccaaacaagcgtaccttgcttatacatgacaatggtgagtactcttcagccagtgattctgaggaaactagtcatgctatgattgccactaaccatgcagcaaatgaggaagtccacgttgatcccatcgacgccgataggtatgagagtcttgttgtgcagcgtgttctcagcacacaggttgcccaggccgaaaaaaatcagcgacacactctattccataccaagggcgtcgtgcacgaacggtcgattcgcatcatcatcgatagtggcagctgcaacaatttggcaagtacaacgttggtagagaaattatccttgcccactcgcacacatccacatccgtatcacattcaatggcttaatgatggtggtaaaataaaggtaacacgttcggtacgtgtccccttttcgctgggttcttattctgattatgctgattgcgatgttattcctatggaagcatgctctttgttattaggtcgaccttggcaatatgatactgatagtttacatcatggtcgttcaaatcattattctttcatgtttaaaggccagaaaataattatacatccaatgacccctgaccaaattttgaaagatgatcttactagggctgctaaaactgcacaacaagtcaaatcgacatcagccgcacctattaaatctgaaatcaagttgcactctcctgttttacttgctacacgtgctgattttgatgatctccatgaagctcataagccctgttatgcacttgtatgctcgcgcatgcttgttccgcttgatgatgcaccgtctttggatataccccctgctgttgttaaccttttgcaggagtatgctgatgtttatcctacggacttaccaccgggtcttcctcccctccgtgccattgagcatcagatcgatctcatccccggcgcttctcttccgaaccgcgccccgtaccgtacaaatccagaggagacgaaggagatccagcgccaggtgcagacgctgcttgataagggttacattcgtgagtctcttagcccttgctcggttcctgttttactcgttccaaagaaagatgggtcatggcgtatgtgcgtagattgtcgtgctattaataacatcacaattcgttatcgatatcctattccacgccttgatgatatgttagatgagcttagtggtgccgttattttctctaaggttgatttgtgtagcggttaccatcagattagaatgaaactcggtgatgaatggaaaacggcttttaaaacgaaatttggtttgtatgaatggttggttatgccatttggattgactaatgctcccagcacctttatgcgtttaatgaacgaagttctacgggccttcataggtttgtttgttgttgtttatttcgatgatatccttatttacagcaagtctatagaggagcatttagcacatttgcgtgctgtttttgatgctttgcgtgctgctcgcttgtttggtaacatggaaaagtgcacattttgcacgcaacgtgtctcgtttcttggttatgtggttactccgcagggcattgaggtggatagcagcaagattgctgccattcgggagtggcctacaccgacgacggtcacacaaattcggagctttcttggacttgccagtttctaccacagatttgttcgtgattttagctccattgcagcgcctctacatgagcttacaaagaaagatgtgctgtttgcttggagtgattcgcaggaggtagcgttcagcactttgaaagataagttaacccaagttcccctcttgcaattgcctgattttaataaagtttttgagcttgaatgcgatgctagcggtattgggctaggtgctgttttgttacaagaaggaaaaccagttgcttattttagtgaaaaattaagcggtgctagtctgaaatattctacttatgataaggagctttacgctttagtgcgcactttgcatacatggcagcactatctttggcatcgtgagttcataattcattctgatcatgaggctttaaaacatattcgtacccaaacaaatctgaaccgtcgtcatgctaaatgggtcgaattcattgagtcctttccttacattattaaacacaagaacgggaaggacaatgatattgctgatgctttgtctcgtcgctataccttgctgtcacaattagattttaaaatctttggtttggacactgtaaaggatcaatatattgacgatgctgattttaaagatgctttcggccattgtattaatgggataccatggggcaaatttcacatacaggatgggttcctgtttcgcactaacaagctgtgtgttccagctagttcggttcgtcttttgttgttacaggaggcgcatggaggcggtctcatggggcattttggcgtctacaaaacgcatgaggtgttggctgcccacttcttttggcctcggatgcgcgctgatgttgagcgccttgttgcacgctgcactacttgtcagaaagctaagtcacggttgaacaaccatggtttgtatatgcctttacctgtcccttcttctccttggcttgatatctctatggactttgttttgggcttgcctagaactaagaaggggagggatagtatttttgtggttgttgatagattctctaaaatggctcactttataccttgtcataaaactgatgatgctagcattgttgctgaattgttctttagagaaattattcgtttacatggtattccaaaaacaatagtctctgatcgcgatgctaagtttctaagccatttttggagatctctttggaataaattgggaactaaattgttgtttagcactacttgtcaccctcagactgatggacaaactgaggtagtaaatagaacattatctaccatgcttagggctgttttagacaagaatttgagacgttgggaggattgcttgcctcatgttgaatttgcttacaatcatgccacgcattcttctacaaagatgtgccctttccagattgtttatggttacattcctagggcacctattgatttgatttcacttaatgctgcgaacgccccacatgtagatgcttcggcacatgttgaacaaatgattaccatacatgaacaaacgaaacagaacattgctgctactaatgcaaaaaatcaggttgctggtagtaaaggaagaaaacatgttacttttgaacctggtgatatggtttggttgcatttaagaaaggatcgttttcctactttgcgccgttctaaattgatgcctcgtgctgctggtccttttaaggtactaaccaagattaatgataatgcttatatccttgacctgcctgcggagtttggtgtttccactagttttaatgttgcagatttgaaaccgtatgcgggagaagatgaggagttgccgtcgaggacgacttcagttcaagaaggggaggatgatgcggacatcaacaccaacacgagcacatctacaccagcagcaccttctctagcccaggcgccaccccttccacctgggccagtgactcgggcccgtgcaagagacttgaactacatcacgttgttaaagaacgaaggcccggaagaatagacgaccagcccaattgcggtccataatggacgacctagggttggccgcccctctctatttattcaggagctgcgcctcctttatttcccgagttttgttttacgttagccttagctactctcgaacacgcgcaaatctgcgctgtcttcgtgtattcagaactccaccctcgagtaatagattagattgctcgcctctttttcttgttcgttcttcgattgcgcacaggaaacgatcttcgtgatcaggccgatctcgcatcagcaaggtcggtaaccacagggagttggttcagcgattgcattggcgcctcgggcttgctcgtcgtagtcggatcgcaagggtcatcttccgccaaatcggaattatctctactcgccgaaagatcgggcacctcagctacatcagacatcactatgagtacgactacaccagcagtgatgaggacatcactatgagtacgactacaccagcagcacctccacatcaagcgccacttccttcattagctgggccaatcacttgggcccgtgccagagatcttaacttcgtcatgctactgaagaatgagggcccagaagaatagacgaccagcccaactgcggcccatagtggacgacctagggttggccgcccctaggggctgcgccccctctatttatccaggagctgcgtctcctttattttggagttttgttttacgttagccttagctactctcgaacacgcgcaaatctgcgctgtcttcgtgtattcagaactccaccctcgagtaatagattagattgctcgcatctttttcttgttcgttcttcgattgcgcacaggaaacgatctttgtgatcaggccgatctcgcatcagcaaggtcggtaaccacagggagttggttcagcgattgcattggcgcctcgggcttgctcgtcgtagtcggatcgcaagggtcatcttccgccaaatcggaattatctcaactcgccgaaagatcgggcacctcacctacatcaattggtatcagatttccaggttgatcggtgagtttatcgagcatttttttcctacagtccacaaatccacataaaaattcaggttagatcttatcccagcacccttttgagcctcgcactttctttcaataatctgcattgttgaatttgtgtgctttcgcgtcatttgttgttggttgcattgtgttcttccaccattcaaaccctagcgccgccaccatctcccgtttgatcatgccacaaaccgagtcaacattgtttccttgtttttctccttcggttacgtaaaaaaaacagaaaaaacaaatcgagtcaacggctgtttccttgattttctccttcggttacgaaaaaaaaacagaaaaaaacaaactgagtcaacgaccgcttccttgtttttctccttcggttacataaaaaaacagaaacaaaaaaaagaaaacgaaggagaaaggatacggttgtttcatcccggtcgtttttaaaacataacttgaggaaccttccgtaaaccgggcataacttttcgctcgggtgtccaaaaaaatctgaaatttttacaggagcttgttgacaccattctgaggctggccaaactcacctatggtctgtttggggttcgacaaaattgtcaaaaaaattcaggaaaataaagaaaaaaattcgtcaaagttctcgcacgcttttcagagtacttcctgattttctatagaccacatctgatatctgttttaggtgaaacttcgtgtagctcctatcttgttgcttcttgtgctgagaaaaatatcaaaaaaatcatacaaaaaagaaaaacaaaatcacctgtgatttctactagtgcctttttggcatcactagttcaatatttacggtactgccattctgttagtttcatccatcctttgcacctgtggccagcaatatagtttcgtgttttgcactataattcaactttgcattattgtttgatcgtgctaatccttgacttgagtgcagcctacccacaactccacatatttctacgacgagcaggtttctgtttctccacgcaatcgctcatccaatctttcaccggttccacctgttggttgcagttcaccactgtggcttggtaagaacggataagaacttgataacagcactagtgtgagcaccttgtgagcagtacacccatgtttttgtcgttggtttttctccttttggtgtttgcgctaactatggcaggagcacacgacatggtggatgcccagttgcaggaagtaaggggacaagttgatggacttgctgctgacattaggacgatgcatgaacggcttgattcaacgatcacttcgacgaccgagcgtttcaaccaacttgaccttgctcaaacggcgactcgcaccacacttgacaccatcctggcacgccttgatgcattgaccacaaagatggagcaggaatacggcggtgacactgagcaggacgatggagatcgccgtggtcgtgcacgtcgtgtggttcttcatccccctaatgacttattttctaagattaaatttaaaattccatcttttaatggtaaatatgatcctgctgcatatcttgattgggaattagaggtagaacagaaattttcatgccatgatattcctgctaatagcctagtgaaggctgccattagtgaatttactgattttgctttaatttggtggcgtgagtataaacaaaaacttcccattaacagtgtcattacttggacccaattaaaaactgccatgtgccacagatttgttccttcctattatgctcgtgatttgcttaacaaaatgcagcgttttcaacaagtttcacagtctattgaggaatattaccaggagttacaaaagggtatgctttgttgtggtttagttgagtcaacgctgctatggcgcgttttcgtggtggtttgaacagggaaattcaggatatacttgattataaggattattttgatataaccacattgtttgaatatgcttgcaaagctgaacgtgaagtgcagggacgacgatcaaagacatatactaactctcttgcaggccgggtccaacacacaactcaactccttccagccctgcaccttctacgcctagcactacatcgcgcacagggacgaccaagccaatggcgctccctgccaaaggcgccgcttcttccacaggacgtacacgggatattcagtgccatcgttgcagagggtttgggcatatgattggggactgcccaaacaagcgtaccttgcttatacgtgacaatggtgagtactcttcagccagtgattcagaggaaactagtcatgctatgattgccactaaccatgcagaaaatgaggaagtccacgttgatcccatcgacgccgataggtatgagagtcttgttgtgcagcgtgttctcagcacacaggttgcccaggccgaaaaaaatcagcgacacactctattccataccaagggcgtcgtgcacgaacggtcgattcgcatcatcatcgatagtggcagctgcaacaatttggcaagtatagcgttggtagagaaattatccttgcccactcacacacatccacatccgtatcacattcaatggcttaatgatggtggtaaaataaaggtaacacgttcggtacgtgtccccttttcgctgggttcttattctgattatgctgattgcgatgttattcttatggaagcatgctctttgttattgggtcgaccttggcaatatgatactgatagtttacatcatggtcgttcaaatcattattctttcatgtttaaaggccagaaaataattatacatccaatgacccctgaccaaattttgaaagatgatcttactagggctgctaaaactgcacaaccagtcaaatcgacatcagccgcacctattaaatctgaaatcaagttgcactctcctgttttacttgctacacgtgctgattttgatgatctccatgaagctcatatgccctgttatgcacttgtatgctcgcgcatgcttgttcggcttgatgatgcaccgtctttggatataccccctgctgttgttaaccttttgcaggagtatgctgatgtttatcctacggacttaccaccgggtcttcctcccctccgtggcattgagcatcagatcgatctcatccccggcgcttctcttccgaaccgctccccgtaccgtacaaatccagatgagacgaaggagatccagcgccaggtgcagacgctgcttgataagggttacattcgtgagtctcttagcccttgctcggttcctgttttactcgttccaaagaaagatgggtcatggcgtatgtgcgtagattgtcgtgctattaataacatcacagttcgttatagatatcctattccacgccttgatgatatgttagatgagcttagtggtgccgttattttctctaaggttgatttgcgtagcggttaccatcagattagaatgaaactcggtgatgaatggaaaacggtttttttaaacgaaatttggtttatatgaatggttggttatgccatttggattgactaatgctcccagcacctttatgcgtttaatgaacgaagttctacgggccttcataggtttgtttgttgttgtttatttcgatgatatccttatttacagcaagtctatagaggagcatttagaacatttgcgtgctgtttttgatgctttgcgtgctgctcgcttgtttggtaacatggaaaagtgcacattttgcacgcaacgtgtctcgtttcttggttatgtggttactccgcagggcattgaggtagatagcagcaagattgctgccattcgggagtggcctacaccgacgacggtcacacaaattcggagctttcttggacttgccggtttctaccgcagatttgttcgtgattttagctccattgcagcgcctctacatgagcttacaaagaaagatgtgccgtttgcttggagtgattcgcaggaggtagcgttcagcactttgaaagataagttaacccaagctcccctattgcaattgcctgattttaataaagtttttgagcttgaatgcgatgctagcggtattgggctaggtgctgttttgttacaagaaggaaaaccagttgcatattttagtgaaaaattaagcggtgctagtctgaaatattctacttatgataaggagctttacgctttagtgcgcactttgcatacatggcagcactatctttggcatcgtgagttcataattcattctgatcatgaggctttaaaacatattcgtacccaaacaaatctgaaccgtcgtcatgctaaatgggtcgaattcattgagttctttccttacattattaaacacaagaacgggaaggacaatgttattgctgatgctttgtctcgtcgctataccatgctgtcacaattagattttaaaatctttggtttggacactgtgaaggatcaatatgttgacgatgctgattttaaagatgctttcggccattgtattaatgggataccatggggcaaatttcacatacaggatgggttcctgtttcgcgctaacaagctgtgtgttccagctagttcggttcgtcttttgttgttacaggaggcacatggaggcggtctcatggggcattttggcgtctacaaagcgcatgaggtgttggctgcccacttcttttggcctcggatgcgcgctgatgttgagcgccttgttgcacgctgcactacttgtcagaaagctacgtcatggttgaacaaccatggtttgtatatgcctttgcctgtcccttcttctccttggcttgatatctctatggactttgttttgggcttgcctagaactaagaaggggagggatagtatttttgtggttgttgatagattctctaaaatggctcactttataccttgtcataaaactgatgatgctagcattgttgctgaattgttctttagagaaattattcgtttacatggtattccaaaaacaatagtctctgatcgcgatgctaagtttctaagccatttttggagatctctttggaataaattgggaactaaattgttatttagcactacttgtcatcctcagactgatggacaaactgaggtagtaaatagaactttatctaccatgcttagggctgttttagacaagaatttgagacgttgggaggattgcttgcctcatgttgaatttgcttacaatcatgccacacattcttctacaaagatgtgccctttccagattgtttatggttacattcctagggcacctattgatttgatttcacttaatgctgcgaacgccccacatgtagatgcttctgcacatgttgaacaaatgattaccatacatgaacaaacgaaacagaacattgctgctactaatgcaaaaaatcaggttgctggtagtaaaggaagaaaacatgttacttttgagccaggtgatatggtttggttgcacttgagaaaggatcggtttcctactttgcgccgttctaaattaatgcctcgtgctgctggtccttttaaggtgctaacaaagattaatgataatgcttatatccttgacctgcctgcggaatttggtgtttccactagttttaatgttgcagatttgaaaccatatatggccgaggatgaggagttgtcgtcgaggacgacttcacttcaagaaggggaggatgatgaggacatcactatgagtacgactacaccagcagcacctccacatcaagcgccacttccttcattagctgggccaatcactcgggcccgtgccagagatcttaacttcgtcatgctactgaagaatgagggcccagaagaatagacgaccagcccaactgcggcccatagtggacgacctagggttggccgcccctaggggctgcgccccctctatttatctaggagctgcgtctcctttattttggagttttgttttacgttaggcttagctactctcgaacacgcgcaaatctgcgctgtcttcgtgtattcagaactccaccctcgagtaatagattagattgctcgtatctttttcttgttcgttcttcgattgcgcacaggaaacgatcttcgtgatcaggccgatctcgcatcagcaaggtcggtaaccacagggagttggttcagcgattgcattggcgcctcgggcttgctcatcgtagtcggatcgcaagggtcatcttccgccaaatcggaattatctctactcgccgaaagatcgggcacctcagctacatcaagcagcacctccacatcaagcgccacttccttcattagctgggccaatcactcgggcctgtgccagagatcttaacttcgtcatgctactgaagaatgagggcccagaagaatagatgaccagcccaactgcgacccatagtggacgacctagggttggccgcccctaggggctgcgcccctctgtatttatccaggagctgcgcctcctttgttttcgagttttgttt

SEQ ID NO: 646 - DNA, 12150 bp, Zea mays
  source: /note="Zea mays BAC clone full insert sequence contig bacm.pk108.h15-2.fis43"
aagtcccgaatactcctgcaaaatgttagtaataacaggaggcaaagaatgctgcatatcttgaattgaaatcaaagcatccttgcataccaaggcgtaggcaacagtagtggaagcaaataattcattaacatcagtttttgttgcaagcaagcaatgtcctttcaattttatcccatctttgttattaccaacagctttaatattcttgttgttctcagttttagctttggtagctttagcaacatcatcacgcacaatagcctcaggggacatgggaagcaaaataattttcttatcatggtgtatgagagaatattgatttgatctaccatgatgcatacaatctgaatcaaattgccatggtctacctagcagaatattacaagcatccataggcacaacatcacagtcaacaacatcacgatatgaaccaatagcaaaattaattcgtaccagcttggttaccttgaccttaccactattgttgagccattgaatgtgatatggatgcgggtgcggtttggtcgtaagtgcaagcttctccaccatgtcgctgctagccaagttgttgcagctacctccatcaatgatcaaacgacatgaacgctccttaatgacacactttgtttgaaacaacgtatgtcgctgattctgctctgccttctccatttgtgcactaagcacacgctgtacaatgaggctctcataatgctctgcatcatctgcaccaatctgttcttcgggtggttccttagtgcctgcatcatcagccgcaagcaaagcaagtgtagcttcatccaaatcactagcagaggaatacccaccatcgtcttttaccaccaaaacacgctgattaggacaatcacgctgcacgtgtccatagcccttgcatcgataacacagaacatctcttgttctacctgtggaagctactgaagaggcactacctgcgggtttctgggcagatttggttgctgaatttgtggaagatgcacgtggtttgtcgctggaggaaggcgggggtgctggtcgacttggcgaaggagttggtgctggtgtacggccggtcatggacgtagtcgtgcgctggtgccatggtgtagattttcctgcagaaacattagaccttgcactagcacgtcgtccctgcacttccctttcagctttgcaagcaagatgaaacaatcgggttacattagcataatctttataagcaaggatgtcctgaatttccctatttaacccgcccaaaaatctagccatagcagattcctcaccctcctctatgttacaacgcagcatacccatttgtaattcctgataatattcttctacacttttagtaccctgtctcaattgttgcaacttgtttaacatatcacgtgcataataagaaggaacaaatctagcccgcatgacccgtttcaacgcatcccaagtttgtggcatgttattaggattcttcttaccatgttctatccaccaaacagaagcaaattcagtaaactcactagtagcagctctaacccgcgcattctcaggaaattcatggcatgcaaacttttgatcaaccgcaatctcccaagtaatgtaagcatcagggtcatatttaccatcaaaaggaggtattttaaatttaaccttactaaaagcatcatcattaccatgtacctcacgtcggtgaaaaccacccatacctctacggttagtacgtagtcgccggcgattaggtgcttcttggtcatcttgttcagtatcagcaacatagtcatcccagttaccttcggcgccctcatcacgcccaccattgatattagcatgcatctcatcaaaccgcctcaagagtgcgacaaggctcttgtcaatatgagcaactgtcatttccacatttgcaagtttggtgttcgtgtcgatctgtgtggcctccaattgccccatcttttcattcgtcacctgcatgtcattatcaagaccttccgtgtgcgtcttcactagccttacaaagtgttgtatgatacccttggtgcgaggagagtgtggcatattacgagaagcatcatcaacctccaatcctgccatggttagacgaacagaggcaacaagaaaaaaaaaacgtgaaggaataaaaactctacaactattaggatgtagctactgcaaggcgctcactctcaacctgccacacaagctcttaccaattcttaccttgcacaacaggaggggtcagcaaccaacaagtctgcaaccgtggaataagtgtatcggtgccgcagcaacacgacctgtcaaactgtagtcgaaatatgtagagttgtaggtgggctgaagcaaggaatacactagtaccacgttagttacaaaagcaagctgaataatcgttcaacggtggtactgtgctggtcctaggctaaaccaggctagagacgtgagcctaggcacaaaggtagtcactgaaaaagaacaactagcacagcacaaagagaaacaacagatttagagattcagcccccttcttcttcttttccttttttttcttttctattcttttttttcttcttcttctgtttttttttgcaggggcctaaacccttttttttcactatgacaacccaaacaataaagatattgctaacaacccctttaaatcagatttaacaaatcttgttaatataggaagtccagaaatctctacgatgattgcggagcgctcagaacgaattttgagataaggtcagatccgttggaaagaagataagataagctttccagattgtatttaaacttccaaatcggatatgatatgtatccgtggtggcaaaaacgaaccagagatgtttttggtgatggtggatttcgtggtgaccaaaacgtggtagaactcaaaactctaaaggaataaactaagaccagcaactcgacacaaccgatgcaaccaaaaactcaacaagccctaactaagtagtactagtaaatgctcaatggtttataggattgcggtaaaactaatctactattttttggctttttctggactataggagataagaaaacagcgaagaaaagtaaatctctcaccgataaaccttgctctgataccaactgatgtgcacccgttgggtgattgcccgatctttcgatgagagggtgtggaataactcgattgggggaggagacgacgttcacggcccgactacagccttccaaagacgctgcgccttagcaaccgatacaccacctcctatggctgtcacgatcttgtggagcgtgacaccctggccactagggcactcgtcctgcaagcaatcgaagaactagcaagaacaagtagaacaagtactgaattaccagatctaaatgtaggtttaaagatcaaactacaatatggtggggttccgaagacaagaagacgggcggctgaactagcacgcgcgcttgcaagcaagtagcgagagctaaacttgatctaaacaaaacccgctgttcttggtggcggctagggggtttataaacatgggaggacgaccacaagggtattggggtcgtgctgcaaccctaggatgcgtccctaatggacctaacttgatacacgacccattgggccaaaatagggtgacgcagcaccatgggcagaaaaggcaggaaatgtctcggtaagaaaacaatgattacggcggcctcagaacagatatgactataattccggatccatatgaaagtagacttgataagctttccatgttgtgcttgaacattccaatccgagcccgcatctgaccgtggtgaccgtcacaagttggtgttcttctgcagtccgaatccagcatgttcaaatccttttccctttcggtcttctccctgattcctaagcaaaacaagagtgcatgggtctccatggtctaaatatgatggacatgaactcaagagtgtaatcacctgatggttgagttgacgagcacgagcgcgagtaatgggaccagaaattggtacttgtattggtatagatgcatcagtagtgtggatgtcttcatcacctgatgggtacgattaagtcagggatcagtccacacgagtgacttgatcacgcttcgctcgtgcctagcctcggccaagggcagccgacctcgagagacttccgtctcgcccgaggcccccctttttaacggcggacgcacctccggctcgcccgaggccttggcttcgtctagaagcaaccctgactaaatcgccgcgccgactgaccaggttgcaggagcatttaacgcaaaggtggcctgacacctttatcctgacacgcgccccccggcagagccgaagtgaccgccgtcactccaccgctccactgaccagtctgacagaagaacagcgccgcctgcgccacaccaattacagtgccactcgacagagtgagtctgacaggcagtcaggccctgccgaaggcgccatgggaaactccgctccgcccgaccccagggctcggactcgggctaagacccggaagacggcgaactccgctccgcccgaccccagggctcggactcgggctaagacccggaagacgacgaactccgctccgcccgaccccagggctcggactcgggctaagacccggaagatggcgaactccgctccgcccgaccccagggctcggactcgggctaagacccggaagacggcgaaatccgctccgcccgaccccagggctcggactcgggctaagacccggaagacgacgaaactccgcctcgcccgaccccagggctcggactccgccctggcctcggccaaacgatctccgcctcgcccgaccccagggctcgggctcggcctcggcaacggaagacagactcgacctcggcttcggaggagcccccacgtcgccctgcctagggcacaggcccgccacgtcaacaggaagcgccatcatcgtcctaccccgaatcgactcgggtcacggagaacaagaccggcgtcccatccggccagctccgccggatgggcaatgatggcgctccacgagctctgtgacgacggcggccctcagctctcttacggaagcagggcgacgtcagcaaggacccgaccgctccaacagctgtccctccgccaggctccgtcgctcctccgacagccacgacatcacgccagcaaggtgccaagacctctccggctgccacattggcatgtacctagggcgctagctctctctccgctagacacgtagcactctgctacaccccccattgtacacctggatcctctccttacgactataaaagggaggaccagggccttcttagaggaggttggccgcgcgggaccgaggacgagacaggcgctctcttggggccgctcgcttccctcacccgcgtggacgcttgtaacccccctactgcaagcgcacccgacctgggcgcgggacgaacacgaaggccgcgggacctccacctctctcacgcccgtctccagccacctcgcctctccccccttcgcgctcgcccacgcgctcgacccatctgggctggggcacgcaacacactcactcgtcggcttagggaccccctgtctcgaaacgccgacaaaatctgataccaattgatgtagctgaggtgcccgatctttcggcgagtagagatatttccgatttggcggaagatgacccttgcgatccgactacgatgagcaagcccgaggcgccaatgcaatcgctgaaccaactccctgtggttaccgaccttgctgatgcgagatcggcctgatcacgaagatcgtttcctgtgcgcaatcgaagaacgaacaagaaaaagatgcgagcaatctaatctattactcgagggtggagttctgaatacacgaagacagcgcagatttgcgcgtgttcgagagtagctaaggctaacgtaaaacaaaactcaaggaataaaggaggcgcagctcctggataaatagagagggggcgcagcccctaggggcggccaaccctaggtcgtccattatgggccgcagttgggctggtcgtctattcttccgggccttcgttctttaacagcataatgtagttcaattctcttgcacgggcccgagtcactggcccaggtggaaggggtggcgcctggactggggaagatggtgcctgggctggagaaggtgctgctggtgtagatgtgctcgtgttggtgttgatgtcctcatcaaacatgcccaatccactacttcaggtccaaaagacatgtttggagtggtttcgcgcaatttcattgccgcacgtcacccattccgaaaacgggtgtcggggtgcatacaaagcacgagtttttgccaccggaaccatttcttcgttttttgcaacggacatgcccaatccactactttaggtccaaaacacatgttaagagtggtttcgcgcaatttcgttgccacacgtcacccattccaaaaacgggtgtcgggggtgcatacaagcacaagtttttgccaccggaaccatttctttgtttttcgcaacgaacatgcccaatccactactttaggtccaaaacacatgttaagagtagtttcgcgcaatttcgttgccgcacgtcacccattccgaaaacgggtgtcggggtgcatacaaagcacgagtttttaccaccggaaccatttcttcctttttcacaacgaacatgcccaatccactactttaggtccaaaacacatgtttggggtggtttcgcgcaattttgttgccgcacgtcacccattccgaagacgggtgtcggggtgcatacaagcacgagtttttgccaccggaaccatttcttcgtttttcgcaacgaacatgcccaatccactgttttaggtccaaaactcattttggggtggtttcgcgcaatttcgttgccgcacatcactcattccgaaaacgggtgtcggggtgcatacaaagcacgagtttttgccaccggaaccatattttcgtttttcccaacgaacatgcccaatccactactttaggtccaaaacgcatgtttggggtttcgcacaatttcgttgcagcacgtcactcattccgaaaacgggtgtcggggtgcatacaagcacgagtttttgccaccagaaccatttcttcatttttcgcaacaaacatgcccaatccactattttaggtccaaaacacatgtttggggtggtttcccgcaattttattgccgcacgtcaccaattccgaaaacgggtgtcggggtgcatacaagcacgagtttttgccaccggaaccatttcttcgtttttcgcaacgaacatgcccaatccactactttaggtccaaaacatatatgtttggggtggtttcgcgtgatttcattgctgcacgtggtgcattccgaatacgggtgtcggggtgcatacaagcacgagtttttgccaccggaaccatttcttcgtttttcgcaacaaacatgcccaatccactactttaggtccaaaactcatgtttggggtggtttcgcgcaatttcattgccgcacgtcacccattccgaaaacgggtgtcggggtgctgatgaacccaacgggtagaagggtgcccgatctttcgatgagagatgatggaggtggaaaaacttgctggagaacgacgttggctgcccgacacacgcgtttacaaggaagtagcaaaggctaaacttacatcaaacaaaacccaagttctttggtggctgctagttgcttaaatagagaaataggaagaaggaattctggtggagtcatgaagttccctcggcagttcctggacgcctcgggtgtagtctcccattaattcttgatccaccagcaagtagacgaagggagctttccacaaagtatttatttgcattaaacgactttggaagttggaagatatgccccatttaaacttgtacttgatgctgttacgaaatcctctcgggtgcagcaacctttattgccttgttgccttctccagtccaagatggttcacctcccaaacacctgagcataataaagtcatcacaaggctttagtacctcatttaaagaagaattagcttcaatagcaaggaacgagttcacctgataattaagtttacgtgcacgggctcgtgtcattggtccttgattagctacgaatggtgaagtggtcactggtatggttgtatcaatgatagtgatgtcctcatcatcctccccttcttgcaacaaagtcgtcctcgactcaaacgtgtcattctctctcaagtatggtgttaaatctgcaatgttaaaagaggaactgaccccaaaatctgcatgcaactgaactttatatgcattatcattaattttgtgaagcactttgaagggtccagcagctcttggttgtaatttagatttgcgtatatcagggaatctatctttccttaaatgcacccatactaaatcaccaggttcaaaggtaatatgctttctacccttgctacctgcttcttcatacttagcattcatggctttaatatttgctttagtttgttcatgcagctttataatcagctcagcacgacgagaagcatcaaaattcattatttcagaatgtgggatggcgataagatcaataggaggcaaattcaatgtgaggcaaacattcttcccacaattttaaaagggcatagtttagttgtagaatgctgagaacgattataagcaaattcaatgtgaggcaaacattcttcccacaatttgatgttatgtttcagaacagccctaagcatggtagataaactatggtttacgacttcggtttgtccatcggtttgagggtgacaagtagtagaaaagagcaatttagttcctaacttagcccataccgttttccaaaaatgactaagaaatttggtatcccgatcggacataatagtgtttggaaccccatgcaaacgaacaacttcacgaaagaacaaatcagcaacatgggtagcgtcatcagttttgtgacatggtataaagtgtgccatttttgaaaatctgtccacaacaacaaaaatactatccctccctttctttgttctaggtagccctaaaagaaagtccatagaaatatcctcccatggtgcactaggaactgggagaggcatgtataaaccatgtgaattaaggcgagacttagctttttgacatgtagtgcagcgagcaacaattcgctccacgtctcttctcatcttcggccaaaagaaatggctggccaggatgtcttctgtcttcttcacaccaaagtgtcccatcaacccaccgccatgtgcttcctgtaataataatatatgcacggaaccagctggaatccataatttgttagcccgaaacacaaagccatctgtgagaacaaatttgttccatgtccttccttctttacaatgtaatagcacatcattgaaatcagcatcgaaaacatattgttgtttaattgtttccaagccaaaaatcttaaaatcaagttgagacaacatggtataacggcgagacaaggcatctgcaatgacattatcttttcctttcttatgtttgatgacatagggaaaagattcaataaattcgacccacttggcatgcctacggttcagatttgtttggctccttagatgctttaaagattcatgatcagaatgtataacaaattctttaggccataagtagtgttgccatgtttccaaagttcgaactaaggcatataattctttatcataagtggaatatttcagacagggtccattcagtttctcactaaaataagcaacaggctttccttcttgcaacaagacaccacccaaaccaataccactagcatcacattccaattcaaaagtcttactgaaatcaggtaattggagaaggggtgtatgagttaacctatccttcaatgtttcaaatgcaacctcttgcgccttgccccacgaaaatggagcacccttcttagtaagctcgtgcaatggccctgcgatggtgctgaaatctttcacaaatcatgatagaaccccgcaagcccgagaaagcttcggacttgcatgaccgtggtagggactggccagctatgtatggcctccacgttagcctgatcaacttcaattccctgcggtgtcacaacatagccaagaaaagagacccggtctgtgcaaaatgtgcacttgtcaaggttaccaaataagcgcgcttcatgtaaagcattgaaaacaacacgtagatgatcaagatgatctactagacatttgctatagatcaagatgtcgtcgaagtagacgaccacaaatcttccaatgaaagcacgtaaaacctcattcattaatctcatgaaagtactaggtgcattagtgagaccaaaaggcatgactaaccactcatacaaaccaaacttggttttaaatgccgttttccattcatcccctagcttcatgcaaatttggtgatatccactacgtaagtcaattttagagaaaatcatcgagccactaagttcatccagcatatcatctaacctagggataggatgacgatatctgatggtaatgttattaattgctcgacaatctacacacatgcgccatgagccatctttctttgggactaataaaacagggacagagcaaggactaagggactcacgcacataacctttatcgagtaattcttgtacttgtcgctgaatctccttggtttcttccgggttcatcctgtatggcgctcagtttggcaaggaagcccctgggatgaggtcaatctgatgctcaattcctcttatcggtggcaggccaggtggcacatcgtttggaaatacatcagcatattcctgcaaaagattagtgacagtagaaggcaaagtagatggtatgttgtgaagtgagaacaaagcatccttgcaaataaatacatagcagattgaagcaacatcatttaattcaagcaaatcagatttggaagcaagaaaacaagcacttttcagttgtatttctgtcttcctcacttgagcagatttagaattgtcactcttatgttgtaccaactcctttgcagcacctagatttttattatgaacagatttatttttctctttgcaagctctagcaacttcatccttcaaaatagcatcgggggacatggggtgcaatacaagcttcttctcattatgcataaaagagtagtgattggttttaccatgatgcacggtgtccttatcaaattgccatggtctaccaaataacatagagcaagcttgcataggtaccacatcacaatcaatataatcatggtatgaaccaattgtaaattccacacggaccatacgtgttaccttaagcttaccactgtcgttgaaccattggatgtagtaggggtgtggatgtggaagctgatgaggacatcaacaccaacacgagcacatctacaccagcagcaccttctccagcccaggcaccatcttccccagtccaggcgccaccccttccacctgggccagtgactcgggcccgtgcaagagaattgaactacatcatgttgttaaagaacgaaggcccggaagaatagacgaccagcccaattgcggcccataatggacgacctagggttggccgcccctaggggctgcgccccctctctatttatacaggagctgcgcctcctttattttccgagttttgttttacgttagctttagctactctcgaacacgcgcaaatctgcgttgtcttcgtgtattcagaactccaccctcgagtaatagattagatttctcgcatctttttcttgttcgttcttcgattgcgcacaggaaacgatcttcgtgatcaggccgatctcgcatcagcaaggtcggtaaccacagggagttggttcagcgattgcattggcgcctcgggcttgctcgtcgtagtcggatcgcaagggtcaacttccgccaaatcggaattatctctactcgctgaaagatcgggcacctcagctacatcaattggtatcaacaaaactcggaaaataaaggaggcgcagctcctgtataaatagagagggggcgcagcccctaggggcggccaaccctaggtcgtccattatgggccgcaattgggctggtcgtctattcttccgggccttcgttctttaacaacatgatgtagttcaattctcttgcacgg

SEQ ID NO: 647 - DNA, 10432 bp, Zea mays
  source: /note="Zea mays BAC clone full insert sequence contig bacm.pk108.h15-2.fis44"
tccgcgggaggtatccgatagggtctcttggagatcggagcagtcccgggttgcaactcaattgcgaactcaatgtctcggtcaggtggcattcctggcaattcatccggaaaaacatctggatagtcacagaccactgggatcttttccactggggattctatcataacaaaggcacaagaacgggtgtatccctggtcaggcaaatacagtgtggtctcaccacaagttggtgagtgcacctcaatggctctagccgcaatatccatcacagcctgattccttgtcaaccagtcagttcccaatataatatccacactctccaaacccagaatgagaaggttggctttaattatcagactaccaaactttataggcacattcttgttaatttggtaggtggcaaccctgcctcctggggtcgaaattgtaatgcccccattggtgtggtgaaagggcaactggcacttggcactaaaccttgcactgataaaactatgcgaagcaccggaatcaaaaagaacaatagcaggaaaatttaatactgtaaagataccagtcatgacgggtgctccctctggaatgtcagccatggtggtgaagttcagcctgccctgcctcacttgcaccttctgcctcttgccttggttctgatttgcattctgcccctgcctctgctggttcctggggcaattcttggcataatgcccagtgttgccacaagtgaagcacctgttgtcattggcttggcggtactgctgctgctgactattccgctgtgctggaaattgattgcggttgggtgcctgctgctgctgctgctgaggtcgaattacccatcgcccttgctgctgctggggtccccttccctgggggtcggacacaatccggaaacgctgtggctgagctgagggtcctgccacaggggtcttccttttcttctctgcctgcctagcggtaatgcagtcctcttgggagatggccatgttgactaactcattgtagctgttggccctgacggcgttgagacgatcccggagcttagtgctgagcccccttctgaatctgtccctcttcttctcatctgtatccgcatgatatcccgcatactggcacaagtcattaaaggcctgggcatactgcaacactgtcctgttgccctgagtgagtgccaagaactcattgagtttcctgtccatgatcccggctggtatatggtgtcctctaaaagctgccttaaactccctccactccacctctcggtcctctggctgcatagcaagaaaatgatcccaccaagtccttgcaggtccgcgaagctgctgggtggcgaacctgactttggtgacctctgagcaaactccatggagcagtgggaatttggattccaccactcgcagccatacatctgcgtcaagtgggtcttccgcccttgtgaacagtggaggctgggtgctgaggaattcctgataggtggccaccgcggggtgacgctggtggtctccaccaccataatgctggggtggtggctgacgttgagccagctgcctcaggatctcattctgctgagccatgagctcctgcagagtgggaggtgggggtggtggtggaacgcgctcgttctggccacgacgctgcctcccagccatctgaaaaaccacatgcttacttaacaccacagttccaatttcaagatttcaacacggggaaaagttaaaaacagcatgaaagatctaacttcaacaaaagggattctttaagaggcataaattcttccttccaaattaaactgataatagcattcctcaaacaagcccccaagagagtttaacatgattacatcaatttgttctaaaatgactcaaccctacctagcctagtaccccaagggtgcaaaagctaagctagctgcgaggagtccgactgtccgacttctaagcctaccttggacacctagcgagcgaacgaagcaacactggactcgggggaaggtggtcttcccgagccagcagtgtccacactggaggcaggctcatctcctccctcaatgtcgacgtcctcgtcgtcctcctggtcctggatctcttggtgatgcatgtccaggtgctcgttagcctcagcaagctgttgctgagtgttaaggagctgatcctctaggacctcaatggtgttctcccgggtgcccactagctcctccaactcatgaatctcaccagacagctgctccacttgcaaatctttctgtaccatttcctgagataggtcaaccacaagctcctctcggttatccagcgtgatctttgttgcctccagcagtgccatcaaatgggacattgcctcaccgcgcatcacttgcagatggtacagagcattcatgcaccgtactgttaagtgcgcagtctgtcctgggtagatggcccagatgtccttggcatgttccacccgatccttccacattgggtcgtcctccttttcagcggggaacaagccaatgggatgggtagccagctccaagggatggaacccgcagaaggtagtcaatccatgcagagcgatcgcctcgatcgtgtcctctgcccggtacccgaaagactctgagtccaaggagcgccagcctggctgcaggggatgaggctccagagtcatcctcaccctacagcggggcactcggtgcttctcgaactgctgcaccgcgtactgagggggtgtcatgtatccggctccctgaagcacttcccataaaatgcggggaaaaccctctcgtgcaagtccgtcagtgtgggtcagtgcatttccttcatcggaggatccgtgggaagtcatctgtgtacggtcaagcgtaagtaaaagaaaaagaatgtaaaaagaacaaggaaaataaaactcagccctcctctagttaagtaaaaaggcactagggacctagttggttgttatcttgtttttaagtcttttactcagttatccaattgcttaattttgaatgcatgcatgctcgtcctgaacgacctcacaacaagatagaaggaatagggaggaactcccatcctgtaaaagtggtctgtagggcctagttacttagccacctagctacccttctattaacctaaggcttcacgtcctaggtctatcctgctcgtcctactatctatccaacttgtttctatcaagttttatttagaaaattgatggtatttacattttattgattcctctgtggtggtacaagctccgataccagctgtggcggaactgcccgaattattccaacttaagtgtccaagtcccgccttagaggctagaccacacttaaatgggaataacccatcaatccctcggatctagtccgacacggccactgacaggatcaagtaccacaatctcactcgaaggtgagtcacagagcaaatacaataaagcataaaaccatacatgccataatgttaaattattacatcaccattatcatcatcggagtttttgcaaaagtatccatcattgttcgaagtgcagcggaataaaactaacggtaaataaaacagagagatggggaagcctgtcccatcactcctcatgctcctcctcagccgaggcagggtcccactcgacagtccaacccggtggcagggtggtcggccaagttatcccagcaaccatctcctccagggaacctgtaaaaattatgccacaagcaaggctgagtatactaatactcagctagacttacccggtgtgaggagtctactcctctacctctagacatgcagctgtttggctgtggggtttggttgccaaaagcactagctgagtttctaaatcaagattttaacttaatcaaagttaagtgtgactctcttaaggctaaaagtggactatctactcatacatggtagcaagcatcattaacagtcaacatcttatctcaactcatcatacttccacttattactcaatgcagtacaatggatcaagcagtctcattagctgcgagaagcagacgattcgaatcgagtttttatccttgcaaggtaaacctaaacacacgacatgtaggggcactccgtccccacacacatcaaccgtccccatcgattccctggcaacagatcaaggctcaccgccttggcgtacaatgccccactgaccccgactggccgacgtgcagtgaccgcacttgtacccaccataaccggaatgggagacctcgtctcaggtcgcgtgaggggatatgtctgcgggcaggttcactcaggtactaggcttaccgatttaccatatttctcggtatgtgtttagtacattcaaacgcttgacgcaggtatccgcacgttaatccttattccattttccatctcgtaaacaaccaatccccatggattgttgtccaccaactagtatcatgatagtgtgaaagtgggtacaatcaatttcctgatctcgcgcgagtgctagaaaaatcactcgtcttctaccaagatcctatttaattaaagcaactactcgacctgtcatactagtattcatttcaaaaggattcctgagatcatgcaactagggtttcaaacaattcctacacctaagtgcacaatcaatcctacaatcattaagtgaagtaaaatagcataaataacaggttatgcataaaaccggggcttgccttccaaagcagtggcaggcaggtcctctggtgctggctctggtgctggatctggggcaacctcctgggcagctccttgctccggcacgaggatgtactctccgtccgcaagattacagtctatcaaaatgcaatgaacatgtatgtcatgattatgcaagatttaagaacattaagttaaagaaactaagttaagaattaacttagggtttcctggttctgtggggcttctagtggtatacatagactttgacttattaccctttaagcttaggtttggctttaggataacatagtagaatttgtattgtcttgatacactctagtggacagagtacaaggttttggaaatcattatttcacatttttcattttcctttatttaattttccatttagggtttctaaggtaggtttgaactacatcatggttttaataatttctaaaaattctgtaaaaattatagtgggttgtcactggctattttagcttgttttaagaatttgaggcttaaggtataaaagttaggccttaaacaaaaataacaaaagttaggcaaaaaggggcactttacactacacctcctagttaggggtaggctctgtcctaaaggttatttttgttgacatcctctggtaataataggtctttgtgctaaaaaccacaggaaactaaggggtggttaattagctatgattttcccaagtttaatgtcaaaaaggcactttctacttccttattatttgaaaaatgtcaaacagcagatttcatatttttcttaggttctttctaataaaacaatagtgatcccaagggtgggggtgttttcaccttggggttatttttgtggagtttttctaatttatccttgttttattaatttaaaagagatcttaattattttacactaaaacagggtatgatatatttttctagtgaactacattaactaagtatcttaacaaaaataggggtgccctctggttcaatatttgtgtcacttttcctatttttcttaaacttaagcatatttggaataaggggttaaaactaacttaatgtaatggacagaggggtttaacatttttaaacaggttagtaggtgaatataaacttctccaaattttcctaaccttagtcaaatagcctaactatttttcttactattatttagcttttggccaaagttaacattaaatcagaacttttaagttttccaccgtaccaaggggttttatatttttcctaaataggttacatgatttagagtctggcaaaattggtttgaccaaaattggataaaccaaacagaagttatgggtttttaaagtttctgtttgaatttaaattaggttttaattaagttttcctggaaaaacagtttgcgccgaggtccctgggtttaaaacaattcaaacctcgcagatctacccttaaggcactattcacttgagtctctgacctttcacttaaccccctgggtttctctccctctcacccgcagtccctccctcaactgaaacagtagccgcgggaaagaaaagggtggcgcggcttaccggcggcgagggaggtccggcgaagggtagggttggctcggggagggtctggcgatcacgtcgaggtacggctcgtcgtcggggatggccggaatcgcccggtccacatgagcagtcgggcgagctcgtcggcggcgcgtgctccggcctatccacggcggcatagttcaatccaagggcatagggagcttcgtggaggtctaaggagtctaaccgtgcaaggaatcgaagagaggcgcacggtgtacctcggtccacagttgccggcggtcggttgaagtccggtgaccttgggccggcctctccggtgaagcagagcccgattcctcgctcggggagcttcacggagacgtgcacagtcttctccgggggctggacggggttgggaatggctgggctggccggtctacggtggcaggggctcgggtggccgcgggcacgtcgcgtatgggcaaacggcggcgaactgagctccggtgaggcttgagcgcgtgcggaggggtacggccaaggctcctgggcgttttatagtcgcggacgtggaccagggcactggcttggcttgggcgcggcgcgggcgcgcgcgcgggcgtgctctggcgcggcagacggcgtcgaacacgtggcggtttgtttcttccagtgttcaaatgtcgccagaggtcgcaaacgtgcgaatctttgcaaaagtccggcgcagacctcttcctggcacctagggctgtcactcaactgtgagacgccggggcagatacggcctagggagggagatcttcgggtgccaaaacaggtgtgtcatactgagcatatcacgacaaaagccatgccatggcatgtcaaacgtccgagtctcgagctcaactttttccagtgggtgccctaagtggtattgcacatttttggtatagaacccaagtggttttggcgccatttttaaagtgaacacggttgatctttgatttagggctaaaatgggacttagagggaattagagagctctagctctctctccacttggagatttgaaatggggtttccctaggggcctttttgtaatatttccctcccctaattgatggttataatgttgcttagggtttgggtaaaaattacccatgttttgcacatttgctcactctctttcccctcttatccatggttttgggagatagggtttaagagaggcctagggttctttccccctctcccaaggtgatagttgcacacaattagggtaatgcctttggtcattcccaactcttggtaaaaacttagtttccaaagccccttatacttttgctccttaagttctttcacatgtgatcatagtcttgagtgccaaggtgtgctccagccatggcaacacctggggtgttacagccctccccccttaaaggaatctcgtcccgagatttgaggtagagtcccttggagggtgctggaaggtgtgttggtgctactctttctttatactcaagtttctcttgttaactgctcttcgaatgtcattctctttgcaacttcagaaggaagcccttcttaagttgaattcccaacttagactattcttgctatcttagtttcccttataattgatttcaaagggcaggtgggggggttctgtggttacataccgactcttttgggtagaaagtcggggaagcgagagcgtagaaaatcctcagtctcccatgtagcttcttctgttgaatggtgactccactgaaccttatacattcttactgtccttgcccgagttgatctatccttttgatctaataccttgacggggtactcttggtaggataaatctggttctatctcaatgtctggttccgggagtacttcagtgggtagacgaacacatttccgtagctgagatacatggaacacattatgcactgctgacatgtgaggtggcaattccaattggtaagctacgggtccacaacttgccttgatctcatagggtccaatgtagcgaggggctaacttgcccttgatcccgaatctctgaacacccttggtgggggataccttaagatagacatgatctcccacctcaaactgtagaggtttccgcctcttatcatgatagctcctttgcctagcctgagcagcttccaagttcttggtaatgaccctgacctttgcctctgcctcgagtactaagtctggcccaaaaatttccctttctcctgcttgagaccaattcaatggggtcctacaccttctcccatacaatgcctcaaaaggtgccatcttcagactggactgatagctattgttgtaagagaactctgccaaagacagacacttgtcccattcctttccataatgtagtgcacaggctcgcaacatatcttccaaaatttgattcaccctttctgtctggccatctgtttgtgggtggtatgctgagcttcggatgacatgggtcccaagtgattcttgcagtttctcccaaaagcgtgccacaaacagtgctcctctgtcagatataatggtcttgggaataccatgcaatctcactatctgatcaacataaatctcagcatacttctcggtcttgtgggtggtgtgcacgggcaagaaatgagcagtcttggtcaatctgtccacgataacccaaatagaatcatggtgcctggaggtattgggtaatcccactatgaagtccatgcaaatgtcctcccatttccaagatggtatgggaaggggttgcaaatggcctgctgccttcaagtgactagccttaattctctggcaggtgtcacattcggatatgtatttggcaatttcccttttcattctagtccaccaatatagagatctgagatcatgatacatcttgttgctaccagggtgcatggagaatttggaaaggtgagcttcgtccagtatcttctttctaagctcagggtccttgggaacaaccaatcgatctccaaaccatagaattcccttactgtcctgtcggaaacacttgtatttctctgccttttgtttgatcatatccttgataacctgaactcccttatccccaagctgtgcctgaactatttgctcttgcaatgtgggttccaccgagatatagcttaggttacccgaagaaacaacttccaggttcagtttgcacaattcatcacacagggtggtaactcccacatccatgctcatacaattacactgggcttttctgcttaaggcatctgccacaacattggccttaccagggtggtaatgcacctctagatcatagtccttgatcaactctaaccatctcctttgcctcatgttcagatctgcctgggtgaagatgtatttgagactcttgtgatcagtgtagatgttacagtgagctcccatcaggtagtgtctccaaatcttaagagcatgaactacagctgccaactctagatcatgtgtagggtagttctgctcatggggcctgagtgcccgggaagcataagcaatcactctgctcttttgcatcaagacacatcccaaaccagtaccagaagcatcacaataaacttcaaatggcttggtattgtcaggttgagccagcactggggctgttgtcaaatgctgcctcaaggtatggaatgcaccttcacacttttggctccactcaaatttgactcccttctttaacagttcagtcattggtttggcaattctggagaaatccggaataaatcgtcgatagtaccctgccaatcccagaaaactccgaatttgctttactgtggtcgggggtttccaatccatcacttcttgcaccttctcaggatcaactgataccccatcctgagaaatggtatgacccaagaatttgatctccttcagccaaaactcacacttactcagcttagcatacagctgatgatcacgcagtctctgaagtacagtatgcaagtgtttagtgtgctcggcttcgttcttggaataaaccagtatatcatcaatgaaaacgaccacgaacttgtctaactctggcatgaatactgagttcatcaaatacataaaataagccggggcattggtcagcccaaaagacatcaccagaaactcatacagtccatatctggtagagaaagccgtcttgggaatatcactagcgcggatcttgatctgatggtatcttgagcgaaggtctatcttggagaataccttggctccaaccaactgatcaaacagaacatcaatgcga

SEQ ID NO: 648 - DNA, 12957 bp, Zea mays
  source: /note="Zea mays BAC clone full insert sequence contig bacm.pk108.h15-2.fis45"
ttctccttcggttacgtcaaaaaaaaacagaaaaaaaacaaaccgagtcaacggtcgtttccttgtttttctccttcggatacgaaaaaaaaacaaaccgagtcaacggccgcttccttgtttttctccttcggttacgtaaaaaaaacagaaataaaaaaaagaaaacgaaggagaaaggatacggttgtttcatcccggtcgttttaaagcataaattgaggtacctgccgtaaaacgggcataacttttcgctcgggtgtccaaaaaatctgaaatttttacaggagcttgttgacaccattctgaggccggccaaactcaccttcagtctatttggtttcgacaaaattgtcaaaacaattcaggaaaataaagaaaaaatccatcaaagttctcgcacgcttttcagagaacttcctgattttctgtagaccacatctgaactctgttttaggtgaaactttgtatagctcctattttgttgcttcttgtgctgagaaaaatatcaaaaaaatcatacaaaaaagaaaaacaaaatcacttgtgattcctactagtggcctcactagtataatatttacggtactgccattctgctagttccattcgtcctttgcacttgtggccagcaatatagtttcgtgttctgcactataattcaactttgcattattgtttgattgtgctaatcattgacttgagtgcagcctacccaaaactccacatatttctacgacgagaaggtttctgtttctccaggcaatcgctcatccaatctttcaccggttccacctgttggttgcagttcaccactgtggcttggtaagaacggataagaacttgataacagcactagtgtgagcgccttgtgagcagtacacccctgtttttgtcgctggtttttttttctccttttggtgttttggtgtttgcgctaactatggcaagagcacacgacatggtggatgcccagttgcaggaagtaagggagcaagttgatggacttgctgctgacattaggacgatgcatgaacggcttgattcaacgatcacttcgacgaccgagcgtttcaaccaacttgaccttgctcaaacggcgactcgcaccacactcgacaccatcctggcacgccttgatgcattggccataaagatggagcaggaatacgacggtgacactgagcaggatgatggagatcgccgtggtcgtgcacgtcgtgtggttcgtcatccccctaatgacttattttctaagattaaatttaaaattccatcttttaatggtaaatatgatcccgctgcatatcttgattgggaattagaggtagaacaaaaattttcatgccatgatattcctgctaatagccaagtgaaggctgccattagtgaatttactgattttgctttaatttggtggcgtgagtataaacaaaaacttcccattaacagtgtcattacttggacccaattaaaaactgccatgcgccacagatttgttccttcctattatgctcgtgatttgcttaacaaaatgcagtattttcaacaaggttcacagtctgttgaggaatattaccaggagttacaaaagggtatgcttcggtgtggtttggttgagtcggatgacgctgctatggcgtgttttcgtggtggtttgaacagggaaattcaggatatacttgattataaggattattttgatataaccacattgtttgaatatgcttgcaaagctgaacgtgaagtgcagggacgacgatcaaagacatatactaactctattgcaggccggggtccaacacacagctcaactccttccagccctgcaccttctacgcctagcactacatcgcgcacagggacgaccaagccagtggcgccccctgccaaaggcgtcgcttcttccacaggacgtacacgggatatttagtgccatcgttgcagagggtttgggcatatgattcgggactgcccaaacaagcgtaccttgcttatacgtgacaatggtgagtactcttcagccagtgattctgaggaaactagtcatgctatgattgccactaaccatgcagaaaatgaggaagtccacgttgatcccatcaacgccaataggtatgagagtcttgttgtgcagcgtgttctcagcacacaggttgcccaggccgaacaaaatcagcgacacactctattccataccaagggcgtcgtgcacgaacggtcgattcgcatcatcatcaatagtggcagctgcaacaatatggcaagtacagcgttggtagagaaattatccttgcccactcgcacacatccacatccgtatcacattcaatggcttaatgatggtggtaaaataaaggtaacacgttcggtacgtgtcccctttttgctgggttcttattctgattatgctgattgcgatgttattcctatggaagcatgctctttgttattgggtcgaccttggcaatatgatactgatagtttacatcatggttgttcaaatcattattctttcatgtttaaaggccagaaaataattatacatccaatgacccctgaccaaattttgaaagatgatcttactagggctgctaaaactgcacaacaagtcaaatcgacatcagccgcacctattaaatctgaaatcaagttgcactctcctgttttacttgctacacgtgctgattttgatgatctccatgaagctcatatgccctgttatgcacttgtatgctcgcgcatgcttgttccgcttgatgatgcaccgtctttggatataccccctgttgttgttaaccttttgcaggagtatgctgatgtttatcctacggacttaccaccgggtctccctcccctctgtggcgttgagcatcagatcgatctcatccccggcgcttctcttccgaaccgcgccccgtaccgtacaaatccagaggagacgaaggagatccagcgccaggtgcagacgctgcttgataagggttacattcgtgagtctcttagcccttgctcggttcctgttttactcgttccaaagaaagatgggtcatggcgtatgtgcgtagattgtcgtgctattaataacatcacagttcgttatcgatatcctattccacgccttgatgatatgttagatgagcttagtggtgccgttattttctctaaggttgatttacgtagcggttaccatcagattagaatgaaactcggtgatgaaaggaaaacgacttttaaaacgaaatttggtttatatgaatggttggttatgccatttggattgactaatgctcccagcacctttatgcgtttaatgaacgaagttctacgggccttcataggtttgtttgttgttgtttatttcgatgatatccttatttacagtaagtctatagaggagcatttagaacatttgcgtgctgtttttgatgctttgcgtgctgctcgcttgtttggtaacatggaaaagtgcacattttgcacgcaacgtgtctcgtttcttggttatgtggttactccgcagggcattgaggtggatagcagcaagattgctgccattcgggagtggcctacaccaacgacggtcacacaaatttggagctttcttggacttgccggtttctaccacagatttgttcgtgattttagctccattgcagcgcctctacatgagcttacaaataaagatgtgccgtttgctttgagtgattcgcaggaggtagcgttcagcactttgaaagataagttaacccaagctcccctcttgcaattgcctgattttaataaagtttttgagcttgaatgcgatgctagcggtattgggctaggtgctgttttgttacaagaaggaaaaccagttgcttattttagtgaaaaattaagcggtgctagtctgaaatattctacttttatgataaggagctttatgctttagtgcgcactttgcatacatggcagcactatctttggcatcgtgagttcataattcattctgatcatgaggctttaaaacatattcgtacccaaacaaatctgaatcgtcgtcatgctaaatgggtcgaattcattgagtcctttccttacattattaaacacaagaacgggaaggacaatgttattgctgatgctttgtctcgtcgctataccatgctgtcacaattagattttaaaatctttggtttggacactgtgaaggatcaatatgttgacgatgctgattttaaagatgctttcggccattgtattaatgggataccatgggacaaatttcacatacaggatgggttcctgtttcgcgctaacaagttgtgtgttccagctagttcggttcgtcttttgttgttacaggaggcgcatggaggcggtctcatggggcattttggcgtctacaaaacgcatgaggtgttggctgcccacttcttttggcctcggatgcgcgctgatgttgagcgccttgttgcacgctgcactacttgtcagaaagctaagtcacggttgaacaaccatggtttgtatatgcctttgcctgtcccttcttctccttggcttgatatctctatggactttgtgttgggcttgcctagaactaagaaggggagggatagtatttttgtggttgttgatagattctctaaaatggctcactttataccttgtcataaaactgatgatgctagcattgttgctgaattgttctttagagaaattattcgtttacatggtattccaaaaacaatagtctctgatcgcgatgctaagtttctaagccatttttggagatctctttggaataaattgggaactaaattgttgtttagcactacttgtcatcctcagactgatggacaaactgaggtagtaaatagaactttatctaccatgcttagggctgttttagacaagaatttgagacgttgggaggattgcttgcctcatgttgaatttgcttacaatcatgccacgcattcttctacaaagatgtgccctttccagattgtttatggttacatccctagggcacctattgatttgatttcacataatgctgcgaacgccccacatgtagatgctgctgcacatgttgaacaaatgattaccatacatgaacaaacgaaacagaacattgctgctactaatgcaaaaaatcaggttgctggtagtaaaggaagaaaacatgttacttttgagccaggtgatatggtttggttgcacttgagaaaggatcggtttcctactttgcgccgttctaaattaatgcctcgtgctgctggtccttttaaggtgctaacaaagattaatgataatgcttatatccttgacctgcctgcggaatttggtgtttccactagttttaatgttgcagatttgaaaccatatatggccgaggatgagttgtcgtcgaggacgacttcacttcaagaaggggaggatgatgaggacatcactatgagtacgactacaccagcagcacctccacatcaagcgccacttccttcattagctgggccaatcactcgggcccgtgccagagatcttaacttcgtcatactactgaagaatgagggcccagaagaatagacgaccagcccaactgcggcccatagtggacgacctagggttgaccgcccctaggggctgcgccccctctatttatccaggagctgcgcctcctttattttcgagttttgttttatgttagccttagctactctcgaacacgcgcaaatctgcgctgtcttcgtgtattcagaactccaccatcgagtaatagattagattgctcgcatctttttcttgttcgttcttcgattgcgcacaggaaacgatcttcgtgatcaggccgatctcgcatcagcaaggtcggtaaccacagggagttggttcagcgattgcattggcgcctcgggcttgctcgtcgtagtcggatcgcaagggtcatcttccgccaaatcagaattatctctactcgccgaaagatcgggcacctcagctacatcatactcaccattttctcttataattagcacacacttgcttgggcaatcccttcggatgtgcccaaatcctttgcattagaggcattggatgtcctttgttcttcccgtggaagcaatagaagaagatttggttacagcttgggaggatcctttccctgtctcaatagcacgagaagatgcggatttcgatggtgttgtggatgatctattggaagcatctccctgaaacacatggttagagctagcagcactagtgtggggctgccaagatgtattgcgacctgcataagtgttagttctcaagcatcgtccctggacttctctttcagccttacaagcaagatgaaataagcgagtaacattagtgtattccttgtaagctaatatatcttgaatttctcttgtcaaaccacccatgaacctagccattgcagcttcttcattttctacgagaccacacctcaacatgcctatttgtaattgttgataatactcttcaacagatttgttgccttgtctaagctgttgtaatttatgtaataaatcacgagcatgataggaaggaacaaaacgactacgcatgattctttttaaagcattccaagtttgtggtatggtacctggatgtgtagtttggtactcatgccaccaaatagaagcaaaatcagtgaattcactcgtagcagctctaacctttttatcatcagaaaaatcatagcttgcaaatttttgatctaccgacaattcccatgttagatatgcatcaggatcatattttccatcaaacggtggtatggagaatttaattcttcctagagaatcatcattttcacgtatctcacgtcgtggaggtcgaccacccaagccatggcgatcacgtcgttggtgtcgtcggtgcctaatagatcggtcatcacgctcggtgtctgctgaatactccgtagcatcatctcttgcggtaccagcaatggaaccatggccatcatcatcaccttgttgcctaccttcacgcccaacttggtccatcctatctaagcgctcaataattgctgcaagagaggtgttagtagcagcaactgttcgttccaaagtggtcaatgtgttgttggtaacaatttgtgctgtttctaattgaccaatgcgctcattggtgacttcaacatcttcattgagggcatatgtgtgcaaccttacttgacgttcgaaatgttgaatgatgcccactgttcgtggagaatgtggaggtcgcgcatttgcatcctctgccatggttagtgcaaaagagatacaaaaacaagtaatgcagcctagtagttgctatgatatggaaggataaaaactgcctcactagcaagaaatcaagctcttacaagttctcaccacgcaaagcaagtggcgctggcaaacagcaagaagaacaataacagtggctgctagcacaacctggtggtgttgtagaaaaaattgtggatttataggtggctgctaaaacaatagttccaaggaatagctagtaccacgttagccacaacaagttgaataaacgttccacaatggtgctgtgctggtcctagtctaaaccgtaatagagacgcgagccgttacacaaatgatatcaccaaatactcaaaacagcaagctgacttataaaattgtgaaacggtggcacacaaactgtctttgatttgctgcacatggaattttatctaccaatattcttactgcgattttttctcttttttggacgtgcttttttttatgatcagcgcggctttttttctgcacttgccttttcctttcccttgttttttttgaactacagctagagaactaaaaatggtgatctaaacaagatggcgcgaactcgaaactctagcagcaagaaactttggaccagcaactcgacacaaatgcagcaaccgtgaattcaacaagtcaaaaaccaagtagtaaagcaaaggctcaaaatgtttttaggtgattttctgctctaaatatatctttggcaaaagtggactgtaggtaaataaaataaggaagatggagatctctcaccgagcaacctgaaatttgataccacatgatgaacccaacgggtagaagggtgcctgatctttcgatgagagatgatggaggtggaaaacttgttggagaacgacgttggctgcccgactaccacaaccaagatggtgttgcgccttgagcgacaggtacaccgtctcctgataactacgatttagtgtggaggtcgacgttgtgctatccgactacaaccaccacaagggtgctgcgccttagcgatagttacaccggctcctattgttgctgctcttgccgtgccaagaatagccttgaacctgcaagcaatcgagaacaagcaagaacaagataacaagcaaacacgcacggatctgataaagttggggtcccgtttcaagtattcgggtggtctagccgacacacgtgtttacaaggaagtagcaaaggctaaacttacatcaaacaaaacccaagttctttggtggctgctagttgcttaaatagagaaataggaagaaggaattctggtggagtcatgaagttccctcggcagttcctggacgcctcgggtgtagtctcccattaattcttgatccaccagcaagtagacgaaaggagctttccaacaagtatttatttccattaaacggccttggaagttggaagatatgccccatttaaacttgtacttggtgctgttacgaaatcctttcgggtgcagcagcctttattgccttgttgccttctccagtccaagatggttcacctcccaaacacctgagcataataaagtcatcgcaaggctttagtacctcatttaaagaagaattagcttcaatagcaaggaacgagttcacctgataattaagtttacgtgcacgggctcgtgtcattggtccttgattagctacgaatggtgaagtggtcactggtatggttgtatcaatgatagtgatgtcctcatcagcttgtaaggctgaaagagaagtccagggacgatgctttagaactaacacttatgcaggtcgcaatacatcttggcagtcccgcactagtgctgctagctctaaccatgtgtttcagggagatgcttccaatagatcatccacaacaccatcgaaatcagcaccttctcgtgctattgagacagggaaaggatcctcccaagctgtagccaaatcttcttctattgcttccacgggaagaacaaaggacatccaatgcctccaatgcaaagaatttggtcacatccgaagggattgcccaagcaagcgtgtgctaattataagagaaaatggtgagtactgcgatttagataatgatacatatgccatgcttgctggccaagatgctgaaaaggagaatgatgatgaagagcatattgaggctgaacgtgctgaacactatgagagcctcattgtaagacgtgtcttgagtgcccaaattattaaagctgaacaaaaccagcgacacaatttcttccaaactaaatgtgtagttttggaacgatcttgtcgtattataattgatggaggaagctgcaacaacttagcaagcaccaccatggtagagaagcttgggctgaaaacgcttctgatgtagctgaggtgcccgatctttcggcgagtagagataattccgatttggcggaagttgacccttgcgatccgactacgacgagcaagcccgaggcgccaatgcaatcgctgaaccaactccctgtggttaccgaccttgctgatgcgagatcggcctgatcacgaagatcgtttcctgtgcgcaatcgaagaacgaacaagaaaaagatgcgagcaatctaatctattactcgagggtggagttctgaatacatgaagacagcgcagatttgcgcgtgttcgagagtagctaaagctaacgtaaaacaaaactcggaaaataaaggaggcgcagctcctgtataaatagagagggggcgcagcccctaggggcggccaaccctaggtcgtccattatgggccgcaattgggctggtcgtctattcttccgggccttcgttctttaacaacatgatgtagttcaattctcttgcacgggcccgagtcactggcccaggtggaaggggtggcgcctggactggggaagatggtgcctgggctggagaaggtgctgctggtgtagatgtgctcgtgttggtgttgatgtcctcatcatcctccccttcttgaactgaagtcgtcctcgacggcaactcctcatcttctcccgcatacggtttcaaatctgcaacattaaaactagtggaaacaccaaactccgcaggcaggtcaaggatataagcattatcattaatcttggttagtaccttaaaaggaccagcagcacgaggcatcaatttagaacggcgcaaagtaggaaaacgatcctttctcaaatgcaaccaaaccatatcaccaggttcaaaagtaactagtttccggcctttactaccagtaatctgatatttagcattagcagcagcaatgttttgttgagtttgttcatggagattaatcatttgttcaacatgtgcaagagcatctatgtgtggggcgtccgtagcatcaagcgaaaacaaagcaataggcgccctaggaatgtaaccataaacaatttgaaaagggcacatctttgtagaagaatgtgttgcatgattataagcaaactcaacatgaggtaagcaatcctcccaacgtttcaaatttttgtctaaaacagccctaagcatggtagacagagttcgattaactacctcagtttgaccatcagtctgagggtgacaagtggtgctaaacagcaatttagttcctaatttattccacagagatctccaaaaatgactcagaaacttggcatcacgatccgagactattgtattgggaataccgtgcaaacgaataatctctctaaaaaacaattcagcaacattgctagcatcatcagtcttatgacaaggtatgaaatgagccattttggagaatcgatcaacaaccacaaaaatgctatccctccccttcttagttctaggcaatcccaaaacaaaatccatcgaaatatcaatccaaggggaagtaggaacaggcaaaggcatatacaaaccatggttgttcaaccgtgacttagctttctgacaagtagtgcagcgtgcaacaaggcgctcaacatcagcgcgcatccgaggccaaaagaagtgggcagccaacacctcatgtgtcttgtagacgccaaagtgccccatgagaccgcctccatgtgcttcctgtaacaacaaaagacgaaccgagctagctggaacacacagcttgttagcgcgaaacaggaacccatcctgtatgtgaaatttgccccatggtttcccattaatacaatggccgaaagcatctttaaaatcagcatcgtcaacatattgatcttttacagtgtgcaaaccaaagattttaaaatctaactgtgacagcatggtatagcgacgagacaaagcatcagcaataacattgtccttcccgttcttgtgtttaataatgtaaggaaaagactcaatgaattcgacccatttagcatgacgacggttcagatttgtttgggtacgaatatgttttaaagcctcatgatcagaatgaattatgaactcacgatgccaaagatagtgctgccatgtatgtaaagtgcgcactaacgcgtaaagctccttatcataagtagaatatttcagactagcaccgcttaatttttcactaaaataagcaactggttttccttcttgtaataaaacagcacctagcccaataccgctagcatcgcattcaagctcaaatactgtattaaaatcaggcaattgcaataggggagcttgggttaacttatctttcagagtgctgaacgcttcctcctgcgaatcactccaagcaaatggcacatctttctttgtaagctcatgtagaggcgctgcaatggagctaaaatcacgaacaaatctgcggtagaaaccggcaagtccaagaaagctctgaatttgtgtgaccgtcgtcggtgtaggccactcccgaatggcagcaatcttgctgctatccacctcaatgccctgtggagtaacaacataaccaagaaacgagacacgtcgtgtgcaaaagatgcatttttccatgttagcgaataactgggcggcacgcaatgcatcaaaaacatcacttaaatgttccaaatgctctttcttagatttgctgtaaataaggatatcatcgaaataaacaaccacaaacaatcctatgaagggcctcagaacttcattcatcactcgcataaaagtgctgggagcattagtcaatccaaacggcataaccaaccattcatataaaccaaatttcattttgaaggctgttttccattcatcacccagtttcattctaatctggtggtaaccactacgcaaatcaatcttagtaaaaataatggcaccactaagctcatctagcatatcatcaaggcgtggtataggatagcgataacgaatagtgatattattaatagcacgacagtctacacacatacgccatgacccatccttcttgggaacaagtaacacaggaacagagcaagggctaagagactcacgaatgtatcctttgtcaagcaacgcctgtatctggcgctgaatctccttcgtctcatccggatttgtacggtatggtgcgcggtttggaagctgtgcaccgggaatgaggtcgatctggtgctcaatgccacgaagcggtgggagacccggtggtaagtctttgggaaagacatcagcgtactcctgcaaaaggttagcaaccatagggggaatagccaaagatggtgcatcatcaagtgaaatgaggacactagagcatacaagtgcatagcatggcaaatgagcaccgtg

SEQ ID NO: 649 - DNA, 13130 bp, Zea mays
  source: /note="Zea mays BAC clone full insert sequence contig bacm.pk108.h15-2.fis46"
caacacgaaaccagcaacaaatgacgcgaaagcacacaaattcaacaatgcagattattgaaagaaagtgcgagactcaaaagggtgctgggataaggtctaacctgaatttttatgtggttttgtggactgtaggaaaaaaacactcgataaactcaccgatcaacctggaaatctgataccaattgatgtagctgaggtgcccgatctttcggtgagaggagataattccgatttggcggaagatgacccttgcgatccgactacgacgagcaagcccgaggcgccaatgcaatcgctgaaccaactccctgtggttaccgaccatgctgatgcgagatcggcctgatcacgaagatcgtttcctgtgcgcaatcgaagaacgaacaagaaaaagatgcgagcaatctaatctattactcgagggtggagttctgaatacacgaagacagcgcagatttgcgcgtgttcgagagtagctaaggctaacgtaaaacaaaactcgaagaataaaggaggcgcagctcctgtttaaatagagagggggcgcagcccctaggggcggccaaccctaggtcgtccactatgggccgcagttgggctggtcatctattcttctgggccctcattcttcagtagcatgacgaagttaagatctctggcacgggcccgagtgattggcccagctaatgaaggaagtggcgcttgatgttgaggtgctgctggtgtggtcgtactcatagtgatgtcctcatcacaatcctctactttaggtccaaaactcatgtttggggtggtttcgcgcaatttcgttgccgcacgtcactcattccgaaaacgggtgtcggggtgcatacaaagcacgagtttttgccaccggaaccatttctttgtttttcgcaacgaacatgccgaatccactactttaggtccaaaactcatgtttggggtggtttcacgcgatttcattgccgcacgtcacccattccgaaaacgggtgacagggtgcatacaagcacgagtttttgccaccggaaccatttcttcgtttttcgcaacgaacatgccctccactactttaggtccaaactcatgtttggggtggtttcgcgcaatttcattgccgcacgtcacccattccgaaaatgggtgtcggggtgcatacaagcacgggattttgacaccggaaccatttcttcgtttttcgcaacgaacatgcccaatccactactttaggtccaaaactcatgtttggggtggtttcgcgcaatttcattgctgcacgtcacccattccgaaaacgggtgtcggggtgcatacaagcacgagtttttgccaccggaaccatttcttcgtttttcgcaaccaacatgcccaatccactactttaggtccaaaactcatgtttggggtggtttcgcgcaatttcattgccgcacgtcacccattccgaaaacgggtgtcggggtgcatacaaagcacgagtttttgccaccggaaccatttcttcgtttttcgcaacgaacatgcccaatccactactttaggtccaaaactcatgtttggggtggtttcgcgcaatttcattgccgcacgtcacccattccgaaaatgggtgtcggggtgcatacaaagcacgggatttttgccaccgggaacatttcttcgtttttcgcaacgaacatgcccaatccactactttaggtccaaaactcatgtttggggtggtttcgcgcaatttcattgtcgcacgtcacccattccgaaaatgggtgtcggggtgcatacaagcacgcgtttttgccaccggaaccatttcttcgtttttcgcaaccaacatgcccagtccactactttaggtccaaaattcatgtttggggtggtttcgcgcaatttcattgccgcacgtcacccattccgaaaacggttgtcgaggtgcatacaaagcatgagtttttgccaccggaactatttcttcgtttttcgcaacgaacatgcccaatccactactttaggtccaaaactcatatttggggtggtttcgcgtaatttcattgccgcacgtcacccattccgaaaacgggtgtcgaggttcatacaagctcgagtttttgccaccggaaccatttcttcgtttttcgcaacgaacatgcccaatccactactttaggtccaaaactcatatttggggtggtttcgcgcaatttccttgccgcacgtcactcattccaaaaacgggtgtcgaggtgcatacaagcacgagatttttgccaccagaaccatttcttcatttttcgcaacgaacatgcccaatccactactttaggtccaaaactcatgtttggggtggtttcgcgcaatttcgttgtcgcacgtcacccattctgaaaagggttgtcgggtgcatacaaagcacgagtttttgccaccggaaccatttcttcgtttttcgcaaagaacatgcccaatccactacttttggtccaaaattcatgtttggggtggtttcacgcaatttcgttgccgcacgtcacccattccgaaaacgagtgtcgggtgcataaaagcacgagtttttgccaccggaaccatttcttcgttttccgcaacgaacgtgcccattccactactttaggtcctaaactcatgtttggggtggtttcacgcaatttcgttgtcgcacgtcacccattccgaaaacgggtgtcgcgtgcataaaagctcgagtttttgccaccggaaccatttcttcgtttttcgcaacgaacatgcccaatccactactttaggtccaaaactcatgtttggggtgatttcgctcaatttctttgtcgcacgtcacccattccgaaaacgggtgtcgggtgcataaaagcacgagtttttgccaccagaaccatttcttcgtttttcacaacgaacatgcccaatccactactttaggtccaaaactcatgtttgggttggtttcgcgcaatttcgttgtcgcacgtcacccattccgaaaacgggtgtcgggtgcatacaaagcaccattttttgccaccggaaccatttcttcgtttttcgcaacgtttatgccgaatccactactttaggtccaaaacacatgtttggggtggtttcgcacaattttattgcagcggtttcgcgcgatttcattgtcgcacgtcacccattccgaaaacgggtgtcggggtgcatacaagcacgagtttttgccaccggaaccatttcttcgtttttcgcaacgaacataaccaatccactactttaggtccaaaactcatgtttgcggtggtttcgcgcaatttcattgccgcacgtcacccattccgaaaacgggtgtcggggtgcatacaaagcacgagtttttgccacaggaacaatattttcgttttttcccaacgaacatgcccaatccactactttaggtccaaaacgcatgtttggggtggtttcgcacaatttcgttgcagcacgtcacccattctgaaaacaggtgtcgggtgcatacaagcaccagtttttgccaccggaaccatttcttcgtttttcgcaacgaacatgccgaatccactattttaggtccaaaacacatgtttgggttggtttcgcgcaattttattgccgcacgtaaccaattccgaaaacgggtgtcgggttgcatacaagcacgagtttttgccaccggaaccatttcttcgtttttcgcaacgaacatgccccatccactactttaggtccaaaactcatgtttgcggtggtttcgcgcaatttcattgccgcacgtcacccattccgaaaacgggtgtcgggtgcatacaagcacgagtttttgccaccggaaccatttcttcgtttttcgcaacgaacatgcccaatccactactttaggtccaaaactcatgtttggggtcgtttcgcgcaatttcattgccgcacgtcacccattccgaaaacgggtgtcgggggtgcatacaagcacgagtttttgccaccggaaccatttcttcgtttttcccaacgaacatgcccaatccactactttaggtccaaaacacatgtttggggtggtttcgcgcaatttcattgccgcacgtcactcattccgaaaacgggtgtcggggggcatacaaagcgcgagtttttgccaccggaaccatttcttcgttttttcccaacgaacatgcccaatccactactttaggtccaaaacgcatgtttggggtggtttcgcacaatttcgttgcagcacgtcacccattccgaaaacaggtgtcgtgttgcatacaagcacgagtttttgccaccggaaccatttcttcgtttttcgcaacgaacatgcccaatccactactttaggtccaaaacacatgtttggggtagtttcgcgcgatttcattcccgcacgtcacccattccgaaaacgggtgtcggggtgcatacaagcacgagtttttgccaccggaaccatttcttcgtttttcgcaacgaacatgcccaatccactactttaggtccaaaactcatgtttgcggtggtttcgcgcaatttcattgccgtacgtcacccattccgaaaacgggtgtcgggtgcatacaagcacgagtttttgccaccggaaccatttcttcgtttttcgcaacgaacatgcccattccactactttaggtccaaaactcatgtttggggtggtttcgcgcaatttcgttgccgcacgtcactcattccgaaaacgggtgtcgggggtgcatacaagcacgagtttttgccaccggaaccatttctttgtttttcccaaggaacatgcccaatccactactttaggtccaaaactcatgtttggggtggtttcgcgcaatttcgttgccgcacgtcactcattcagaaaacgggtgtcggggtgcatacaaagcacgagtttttgccaccggaaccatttcttcgtttttcgcaacgaacatgccgaatccactactttaggtccaaaacacatgtttggggtggtttcgcacaattttattgcagcggtttcgcgcgatttcattgtcgcacgtcacccattccgaaaacgggtgtcggggtgcatacaagcacgagtttttgccaccggaaccatttcttcgtttttcgcaacgaacataaccaatccactactttaggtccaaaacttatgtttgcggtggtttcgcgcaatttcattgccgcacgtcacccattccgaaaacgggtgtcggggtgcatacaagcacaagtttttgccactggaaccatttcttcgtttttcgcaacgaacatgcccaatccactactttaggtccaaaactcatgtttggggtggtttcgcgcaatttcgttgccgcacgtcactcattccgaaaacgggtgtcggggtgcatacaaagcgcgagtttttgccacaggaacaatattttcgttttttcccaacgaacatgcccaatccactactttaggtccaaaacgcatgtttggggtggtttcgcacaatttcgttgcagcacgtcacccattctgaaaacaggtgtcgggtgcatacaagcaccagtttttgccaccggaaccatttcttcgttttttcgcaacgaacatgccgaatccactattttaggtccaaaacacatgtttgggttggtttcgcgcaatttcattgccgcacgtcacccattccgaaaacaggtgtcggggtgcatacaaagcacgagtttttgccaccggaaccatttctttgtttttcgcaacgaacatgcccaatccactactttaggtccaaaactcatgtttggggtagtttcgtgcaatttcgttgccacacgtcacccattccgaaaacgggtatcggggtgcatacaagcacgagtttttgccaccggaaccatttcttcgtatttcgcaaggaacatgcccaatccactactttaggtccaaaactcatgtttggggtggtttcacgcaatttcgttgccgcacgtcactcattccgaaaatgggtgtcgggtgcataaaaagcacgagtttttgccaccggaaccatttcttcgtttttcccaacgaacatgcccaatccactactttaggtccaaaacacatgtttggggtggtttcgcacaatttcgttgccgcacatcacccattccgaaaacgggtgtcggggtgcatacaagcacgagtttttgccacaggaaccattttttcgtttttcgcaatgaacatgtccatccacttctttaggtccaaaacacatgtttggggtggtttcgcgcaatttcgttgccgcacgtcattcattccaaaaacgggtgtcggggtgcatacaaagcacgagtttttgccaccgtaaccatttcttcgtttttcccaacgaacatgcccaatccactactttacgtccaaaacacatgtttgggttggtttcgcgcaatttcatttacttgatagaccgtggcagtatgatactgatagtttacatcatggtcgttcgaatcattattctttcttgtttaagggtcagaaaataatatccatcccataacccctgaccaaattataaaagatgatcttgctcgggctacaaaaactgcaaagcaacatgcacctactccatccacccctattaatgctgaaatcaagttgcatgctcctgttttacttgctacacgtgctgattttgatgacctacgtgatactcacttgccctgctatgcgcttgtatgttctagtatgctcgtttcacttgatgatgcccgccttaggatattccccttgctgtttctaaacttttgcaggagtacgctgatgttttctccacggacttgccatcgggtcttcccccgcttcgtggcattgaacaccagatcgacctcatccccggcgcccagcttccaaaccgtgccccgtaccttacgaatccggatgagatgaaggagatccagcgccaggtgcaggcattgcttgataaaggttagattcgtgaatctcttagtccttgctcagttccagttttacttgttccaaagaaagatgggtcatggcgtatgtgtgtcgactgtcgcgctattaataacatcacaattcgttatcgatatcctataccatgccttgatgatatgctagatgagcatagtagtgccattatttttactaagattgatttgtgtagtgggtaccatcagattcgaatgaaactgggtgatgaatggaaaacaacttttaaaacgaagtttaggttatatgaatggttggttatgccgtttggattgagtaatgctccaagcacctttatgcgtttgatgaacaaagttctaaggaccttcataggattgtttgtcgttgtctattttgatgatatccttatttacaacaagactatggaagagcatttcaaacatttgagtgttgtttttgatgcgttgtgtactgcccgcttgatgaagacatccacactactgatgcatctataccaatacaagtaccaatttctggtcccattactcgcgctcgtgctcgtcaactcaaccatcaggtgattacactcttgagttcatgtccatcatatttagaccatggagacccgtgcactcttgttttgcttaggaatcagggagaagaccgaaagggaaaaggatttgaacatgctggattcggactgcagaagaacaccaacttgtgacggtcaccacggtcagatgcgggctcggattggaatgttcaagcacaacatgaggtgaggcgcgcccgggaaggctttataggcgcgggcgggcacggccgagggcgaggctctgacaagtgctcggggcgtgcgcgggagaacgccagtgcgcgctctagcgcctggcacagcgtcgagcacgagacagcgcaattagggttggtattagggtttcaacacttttccctttttgaaaaaccttatttgtttggaacatggttctttagatatacacttagtagatcttttcttctcaagttaatttgatgcttcatgcttaatttggctcacataaaatgttaatacttgggttagcactgagagaaaccctaggtgacactggggtgtcacaaccttccccccttaaaggaatctcgtcccgagattcgggtcagagtccttccggggtgaagcgaagggtgagacttacaagaagtgggtgctctattattagggcaaactgctcttcgaatgtcattctctttgcaacttcagaaggaagtccttttaaattttgattcataattacttcattctgatctaagattatatttctgaaatttagattcgaagggcaggaggaggggttgggtatgattacgtaccaatttccttaggtaggtaatcggggaagttggatcgcaagaattcctcagtctcccaagtagcctcttcctctgagtaattactccactggaccttatacaacttgattgatttagcccgagttgatctttccttgcaatccagaatcttggaagggtactcttggtacgatagatctggctctatctccaattctggttctgctatgatctcggtcggcaatcgaacacacttcttcaactgagacacatggaacacattgtggatgacacacatttttggaggtaacttcaatttatatgccacgagtccacatgcttctatgatctcataaggtccaatgtaatgaggggctagcttgcctttgattccaaacctctgcactcccttggtgggtgatactttcaaatacacgaaatctcccacctcgaactggagaggtttccttctcttatcatggtaactcttctgcctggcctgagcagcttctagattcttcctgattagtttgaccttcctttcggcttcagtcactaagtcaggtccgaaaacttctctttctccaggctgagaccaattgagtggtgttctacaccttcttccatagagacctttgaaaggtgccatccttaggctggattgataactgttgttatcactactacaaaacatgttatatgagacggttaatttttagttcttaagacgcttatgaagtgtccaaatttgatggagtcgtaaaagatgtcccacatttaagatggttataaaccgtattaaaagatattatataagacaatttttaatttataaccgtctgaaaaaggtatttgtttaagtcattttttccgataaaccatcttgaattaggtttttgtttaagacactgcttctaaagaaccgtagagaatacaaacattataagtcataaagtatttatcaaactgtctcgaatatcctacaataatagacgattacaataggaaaaccatcttatttaggtgactaataatggacgttttagaaactatcttatttaggagactgatattagacattttggtgaccgtcttattaagatttaaacgaaatgacttacacggcagtacattcttcaatttataatcatttttagatatcatgttataataatttgaaagagaaatatacatacacatatattgaacaacattataattaatataatataaataagtatcattcaatatatcataaataagcattgtcaaacaacgcatacataagtgtactctaaatctaaactaaaatacaactgtttgcactaatgttaagcctaactttatatgaattcaagtctccacactttggggccaccaaatttgaattccattgtatgttttcctgtacaacaaataggagaaaactagacatagcaaaaagctccaaacaacacgtggatggtctcgaagctgcccactacttctccctgttcttgatcactcctacacgcccggtgttcctcccgccggtcaccatgaccacattgccgacgtcaaacttgatgaagtccatgatcttgttggtctccagatcgatcttgatggtaccatttctgcaaacttttagctgtacagaagggatattgtgtttggagtaaagaacgaccaacctcaccacatatggactcaaagaataactttagatctgcttgagtgacctgcgtgtattaaaacagaaccatgacagaatgaataactacaggtagtagcatgaatgcaggtaccaaaccttcttgtcaatgtttgtgcggtagatagtccttgcacacatttcacgttcatcgtcagtctgcagagcacagaaaataagtatatatgtcatgtaggattggcaacacaaccttagtatctcagtttggaacagcagaaacagggtggcaatagtatgttttgtttgacagatcattttatattcctattttccaaaatgcaaaattcagtctgatgaaatcgaagaagtctagcctttttctagaagtgaagggctagacccagtttcatatatcagatttcattattcaagcatggtgccagtatgtttagtgctttatcagataaaattatcttatatgctggcactattgagaaatgattaataatatgatatatgattaaaaatgtaaattacagacattaaaacagatgccgaggctttcaagttctcaccctccagataaaccaaaatatgcttttatttgagccacattccaataggtattctctcccttagattccttaattgcttgctctaagagagcgcaggccgcgatatgtgctcctgctgattgacccatcaagtagattctacagattcatcataaattcatttattaaaagttaacaatcaaaatacaggatctaaagtagagatgctcaaagaacaactgtaagtactactacttgcaaacaaatgtcaaagtatctgatgaggacatcaacaccaacacgagtacatctacaccagcagcaccttctctagcccaggcaccatcttccccagtccaggcgccaccccttccacctgggccagtgactcgggcccgtgcaagagaattgaactacatcatgctgttaaagaacgaaggcccagaagattagaagatggcccaacaggaaggcccggatggggcgcctagggaagtcgtgaacagtaaccgtggtactgtagcgccggccctactgttcacgcctctcctctatttagtcagaatcctgtttcatttagaacttgagttttgttttacatctagctttagctaccccagaacacgcacaaatacgtgctgtcctctgtgattcagaactccacctcgagtgatattaagattgctcgcatctttttcttgttcgttcttcgattgcgcacaggaaacgatcttcgtgatcaggtcgatctcgcatcagcaaggtcagtaaccattgggagttggttcagcgattgcattggcgcttcgggttcgctcgtcgtagtcggatcgtgagggtctacttcaaccaaatcggaattatctccactaaccgaaagatcgggcactccagctctatcaagtggtatcagatttccaggttgatcggtgagtttatcgagtgttttttctcctatagtccacaaaaccacataaaaatttaggttagaccttatcccagcacccttttgagcctcgcactttctttcaataatctacatcgttgaatttgtgtgctttcacatcatttgttgctggttgcattgtgttattccaccattcaaaccctagcgtgccgccaccatatttcgtttgatcacgccataaaccgagtcaacgccacttccttatttttctccttcggttacataaaaaaacagaaaaaaaacaaaccgagtcaacgccgcttccttgtttttctccttcggttacgtaaaaaaaaacagaaacaaaaaaaagaaaacgaaggagaaaggatacaaagcggttgtctcatctcggtcgttttaaacataccttccttaaaccgggcataacttttcgctcggttgttcaaaaaatctgaaatttttacaggagcttattgacaccattctgaggcctgtttggtttcgataaaattgtcaaaaaaaattcaggaaaataaagaaaaaaattcgtcaaagttctcgcacgcttttcagagaacttcctgattttctgtagaccacatctgaactctgttttaggtgaaacttcgtgtagctcctattttgttgctccttgtgctgagaaaaatatcaaaaaatcatacaaaaaagaaaaacaaaatcacatgtgattcctactagtgcatttttggcctcgctagtataatatttacggtactgccattctgctagttccatctgtcctttgcacttgtgcccagcaatatagtttcgtgttttgcactataattcaactttgcattattgtttgatcgtgctaatctttgacttgagtgcagcctacccaaaactccacatatttctacgacgagaaggattctgtttctccaggcaatcgctcatccaatctttcaccggttacacctgttggttgcaaatcaccactgtggcttggtaagaacggataagaacttgataacatcattccattgagcgagttgtcaccaccatttccctgttgtcgttggtttttctccttttcgtgttttggtgtttgcgctaactatggcaggagcacacgacacggtggatgccctcatgttgagtttgcttataatcatgcaacccattcttctacaaagatgtgcccttttcaaattgtttatggttacattcctagggcgcctattgctttgttttcacttgatgctgcggacgccccacacatagatgctcttgcacatgttgaacaaatgattaatctccatgaacaaactcaacaaaacattgctgctgctaatgctaaatatcagattactggtagtaaaggccggaaactagttacttttcaacctggtgatatggtttggttgcatttgagaaaggatcgttttcctactttgcgtcgttctaaattgatgcctcgtgctgctggtccttttaagatactaaccaagattaatgataatgcttataccctcgacctgcctgcggagtttggtgtttccactagttttaatgttgcagatttgaaaccgtatgcgggagaagacaaggagttgccgtcgaggacgacttcagttcaagaaggggaggaatcggaaaatcgataccgtcgaccccctttttattatga

SEQ ID NO: 650 - DNA, 16983 bp, Zea mays
  VARIATION (13662)..(13662): /replace="c" or "g" or "t"
  misc_feature (13662): /note="Nucleotide given in the sequence has no preference with respect to those in the annotation for said position"
  source: /note="Zea mays BAC clone full insert sequence contig bacm.pk108.h15-2.fis47"
catcaggcctttgcagctttgtgctgatgggggttaccagctgaaagaattaggagccttgagggtacccctaattatgggtccccgacagtagcccccgagcctcgaagggagtgttagcactcgcttggaggctttcgtcgcacttttttgcaaggggaccagcctttctcggttgcgttttgtttcggtgggtgcgcgcgagcgcacccgccgggtgtagcccccgaggcctcggaggagtggtttcactccttcgaggtcttaatgcctcgcgtaatgcttcggctggtctggtcgttccctcatgcgagctggccgtagcccgggtgtacggtcgggtcccaagttctcgggctggtatgttgacgctgtcaacggttcggccggagccgggtttgcgagagcagcccccgagcctccgcacaaggcgagagggcgatcagggacagactcggcttttttacatacgcccctgcgtcgcctttccgcaaggaggagggggggaaagcgccatgttgccctcgatgggcgccgaacatggtgtctctggtgagctgcaagagggtaatccgagtggacgtccgtgccccgttcgttaggggtcggctaggggcccagaggcacgcccaaaagtacctgcgggtgatctgtcggacccggtcccctggcaacggggtccgagggctcaatgcctccctctgatgggattccgttacaagatcgttcccgctggtctcggaaatgtcctagggtacctcgggagcgcagcccaagccttggttatgtatcgaacgtacccatggtcatccctcgctcggagtttgaggcggctgtgaacccttcgggggccagccttcgaacccctgatcagtaatgggcgcggagcccgagtagcctgaggcggccgtggaacccttccgaggggccggccttcgaacctctgaccagtagtgggtgtagggcccacacgatctgaggcggctgtcgaacccttccggggggccagccttcgaacctctaatcagtagagaggctcagagcctagttccttcacggggaaggatccttttcggggtatccccctttcccggtccctgttgcaagagagagaaagaggaaaaaaggaaaaggatacgaaatcgaacgacgcggcgtaccttttttgacgcggtcattatggcgaaggcgaagcgtcgccagcttctcctgccaggggcgccgcctgtcccgccgcggagttaatgcgacggggcgagtggttggcggggcggccgttgcgcatgcgcgagccgttcgaggaacggagcacgggcgcgttgtcttcacgtcgtgagagagggttctcttgctgcccccggatggggcgtgagcttgtgccgccctcgggcgtcttgtcgcagccgaagcaccaggtcgcccacctagaggtctcgggaccggacccctcgggcgtggtagcgtcgcagggactgctggtaccgcgctgagtgtagtaaggccttgtcccgagcctcctccagctggtccaacgagtcttctcggctagcttggttgctttggtcggtgtaggccctcgtcctcggggagccgtattccaggtctgtgggcaagacggcctcgaccccgtagactaggaagaacggcgtgaagcccgtggttcggctcggcgttgtcctcagactccagaccaccgaggggagttccttcatccatcgcttgccgaacttgttgaggtcattgtagatccgaggctgagcccttgcagaatcatgccgttggcacgctctacttgcccatttgacatggggtgagctacggcggcctagtccacccggatgtggtgatccccgcagaagtccaggaactttctgccggtgaactgggtgccgttgtcggtgatgatggagtttgggaccccgaagcgatggatgatgttggtgaagaacgccattgcctgttcggacctgatgctgtttaggggtcggacctcgatccacttggagaatttgtcgatggcgaccagcaggtgcgtgtagcccccgggtgccttctgcaaggggccgacgagatccagaccccacacagcaaaaggccaggtgatgggcatcgtctgcagagcctgagcgggcaggtgggtctgccttgcgtagaactgacacccttcgcaggtgcgaacaattctagtggcgtcggccactgccgtcggccagtagaagccttgtcggaaagcattcccgacaagggctcgaggcgctgcgtgatggccgcaagcccccgagtgtatctctcgcaggagttcctgaccttcggcgatggagatgcatcgctggaggatgccagaggggctacggtggtagagctccttctcatcgcccagcaagacgaacgacttggcgcgtcgcgccaaccgccgagcctcggctcggtcgaggggtagctctcctcagtggagatattgcaggtacggggtccgccagttttgattaggcgtgaccccgcttcgctcctcctcgacgcgcagtgcctcaccctcgggtgccgagggtgcctcgggctgagccgagggtggctcgggccgggctgagggtgcctcgggccgtgccgaagatacctcggactgagccgaggttacctcgggctgggccgagggtgccttgggctcgggcgtgtcgtcgatcttgatggagggttgatgtaggtctcgggagaagacgtccggggaaccattgttcgccccgaggctattttagccagctcgtccgcagtctcgttgtagcgccgggcgatgtggctgagctcgagcccgtagaatttgtcctccaggcgccgaacctcatcgcagtaggcctccatcttcgggtcgcggcagtgggagttcttcatgacttggtcgatgacgagctgcgagtcaccgcgagcgtcgaggcgtcggacccctagctcgatggcgatccgcaacccgttgaccagagcctcatactcagccacattgttggacgcagggaaatggaggcgtagcacatagcgtatgtgtttcccgaggggcgagatgaagagtaggcctgcgccggctcccgtcttcatcaacgacccgtcgaagaacatggtccagagcttcggttggatcggagccgtcggtagctgggtgtcgacccattcggccacgaagtccgccaagacctgggacttgatggccttccgaggggcgaacgagattgtctcgcccatgatttccaccgcccactttgcaatcctacccgaggcctctcggcactggatgatctcccccagggggaaggatgacaccacggttaccggatgagactcgaagtagtgtcgcaacttccgccgtgtcaggatcactgcatacagcagcttctgaacttgtgggtagcagatcttggtttcggacagtacctcgctgacgaagtaaactggcctctgaacgggcaatgcatgcccctcttcttgcctctcgaccacaatcgcggcgctaaccacctgagtggtcgcggcgacgtagaccaagagggcttctccggcagctaggggcaccaggataggcgcctttgtgaggagcgccttcaagttcccgagggcttcctcggcctcaggggtccaagtgaagcactcggccttcctcaagaggcggtacagaggtagacctctttcgccgaggcgtgagatgaagcggctcagagccgcgagacatcccatgaccctctgtacgcctttcaagtccttgatgggccccatgctggtgatggctgcgatcttctccgggttggcttcgatgccccgctcggagacgatgaaccccaagagcatgcctcggggcaccccgaagacacacttctcgggattgagcttgacgcctttcgccttgagacatcggaatgtcacttcaaggtcggaaaggaggtcagaagctttcctcgtcttgactacgatgtcatcgacgtaggcctcaaccgtgcggccaatgtgttcgccgaacacatggttcatgcaccgctggtacgtcgcgcccgcattcctcaagccgaacggcatggtgacatagcagtacatgccgaagggtgtgatgaaagaagtcgcgagctggtcggactctttcatcctgatttgatgataccctgagtaggcatcgaggaaagacagggtttcgcacccagcagtggaatccacgatttgatcgatgcgaggcagagggtagggaaccttcggacatgctttgttgagaccagtgtagtctacacacatccgccatttcccccctttctttctcacaagcacagggttggcaagccattcaggatggaatacctctttgatgaaccctgccgccattagcttgtggatctcctcgcctatggctctgcgcttctcctcgtcgaatcggcgcagaggctgcttgacgggtcgggctccggctcggatgtccagtgagtgctcggcgacatccctcggtatgccaggcatgtccgagggactccacgcaaaaacgtcggcgttcgcgcggagaaagtcgacgagcactgcttcctatttgggatcgagcccggagccgatccggatctgcttggaggcgtcgccgctggggtcgaaggggatggacttaaccgtctccgctggctcaaagttgccggcatgacgcttcacgtctggcacctccttcgagaggctctccaggtcggcgatgagggcctcggactcggcgagggcctcggcgtactccacgcactccacgtcgcattcgaacgcgtgtttgtacgtggggccgacggtgatgatcccgttggggcccgacatcttgagcttcaggtaggtgtagttggggacgaccatgaacttcgcgtagcacggtcttcccagcacagcgtggtaggttcctctgaacccgaccacctcgaacgtcagggtctcccttcggaagttggagggtgttccgaagcagacaggaagctcgagttgtccgaggggctggacgcgcttcccgggaatgatcccatggaagggcgcagcgcctgctcggacggaggacagatcgacacgcaggagcccgagggtctcggcgtagacgatgttgaggctgctgcctccgtcaatgaggaccttggtgagcctgacgttgctgatgacggggtcgacgacgagcgggtatttccccggactcggcacatggtcggggtggtcggcctggtcgaaggtgatgggcttgtcggaccagtctaggtagactggcgccgccaccttcaccgagcagacctcccgacgctcttgcttgcggtgccgagccgaggcgttcgccacttgcccaccgtagatcatgaagcagtcgcggacctcggggaactctcctgcttggtgatcttccttcttatcatcgtcgcgggccctgccaccctccgcgggtggcccggccctgtggaagtggcgccggagcatgacgcactcctcaagggtgtgcttgacgggcccctggtgataggggcacggctccttgagcatcttgtcgaagaggttggcacctcctgggggtttccgagggttcttgtactcggcggcggcgacaaggtccgcgtcggcggcgtcgcgtttcgcttgcgacttcttcttgcccttcttcttggcgccgcgctgagttgacgcctcgggagcatcttccgatgggcggccctggggctacttgtcctttcggaagatagcctcgaccgcctcctggccggaggcgaacttggtggcgatgtccatcagctcgctcgtcctggtgggggtcttgcgacccagcttgctcaccaggtcgcggcaggtggtgccggcgaggaacgcgccgatgacatctgagtcggtgatgttgggcagctcggtgcgctgcttcgagaatcgccggatgtagtcccggagagactctcccggctgctgccggcagcttcggaggtcccaggaattcccgaggcgcatgtacgtgccctggaaattgccggcaaaagcttggactaggtcgtcccagctggagatctgccccggaggcaggtgctccaaccaggcacgagcggtgtcggagaggaacagggggaggttgcggatgatgaggttgtcatcgtccgttccacccagttggcaggccagacggtagtccgcgagccacagttccggtctcgtctcccccgagtactttgtgatagtggtcgggggtcggaaccgggtctggaacggtgcccgtcggatggcccggctgaaggcctgcggaccgggtggttcgggcgagggactccgatcctccccgctgtcgtagcgtcccccacgcctggggtggtagcctcggcgcaccctctcgtcgaggtgggcccgacggtcgcggtgatggtgctcgttgccgaggcggcccggggccacaggcgtggtgttgcgcgtgcgcccggtgtagaccgaggcttcccacatgaatcgggaagtcgtggcataaggttccgaggggtacccctgccttcgggaggcagagctctcggcccgtcggaccgcggcgccttccaggagattcttgagctccccctggattcgccggccctcggtggttgatggctccggcatcgcgcggagaagcgctgctgcagccaggttctggccgaccccactagatgcgggtggtggcctgaccctgacgtcgtcggcgacgcggtgctggaagccctggggcagatgacgtatttctccggccgggggttggcccgcccatgcctgcccgacgtcccggcggatcggctcaagcgctcctgctccctcgtcgagcctggcctgcaccccgcggatttgctcgagctgtgggtcatgcccccccgtctgaacggggaccacagctagctcccgtgggatgccaacgcggggcaccggcctagggagatcaccgtcctccggcatgccgagatgattgccttcggagggaccccctagatcgacgtggaaacattcgcggctcgggccgtagtcctcgtcgccgaggctgcggctcgggccgtagtcctcgtcgccgaggctgcggctaccgtcggaatagtcggagaggcagtagtcacatgcggtcatgaagtcccgcatggcactggggttgccaagtccagagaaatcccaacagatgttgggctcgtagtcttcctcggacccagagggcccgacggtcgagacgtccgtcagccggtcccaaggcgaccgcatgcgaaaccccagagggtttggactcgcctcttcgagagcgcccgccaaagcggggtcgctaggcgggttgaggctgaatccaaatgacgtgggatgggaatcggtcggtaccttttggtcgacgagcggcgataaagtcacgccggggactgactgcaccatcgtctcaggtacgagggtgacgtccagcaagcttttcgcgagcgcgctggcgtcgtccgcttgctcgggattggcgtgtcgcggggagacgacactcgtcttcatctcaagcgcgaagtcgatacccggtgcgctccccgttggggtgccggcgctgtcgactcgctcgacagccgacgaggcgctgcctcctgcttggccttggttgccctgccttcccctctgacggcggggaagagggcgggatgagctcgaaggttgttcttccaccacgcgaggaagacgtcgtcgattccgccgccggcgggcgggcagtcggctgccattgtcgttgtcgcgcggcggtggaaggagtatcatgtcgtagctgccatcgagggacatgaactcaagactcccgaaacggagcaccgtctcgggttggagaggttgctggagactgcccatctggagcttgacgggaagctgttcgtcaacacgcagcaggcccctacctggcgcgccaactgtcggcgtttcgagaccggggggtccctgggccgacgagtgaatgtcgccgcgtgccccagcccagatgggtcgagcgcgagggcgagcgcgaaggggggagagcgaggcggtcggagaccggcgtgagagaggtgggaatcccgcggccttcgtgttcgtcccacgcccaggtcgggtgcgcttgtagtagggagttacaagcgtccacgcgggagagggagcgagcggcttcaagcgagcgcctatctcgtcctcgtccccgcgcagccaaccccctctaagagggccctggtccttccttttataggcgtaaggagaggatccaggtgtacaatggggggtgtagcagagtgctacgtgtctagcggaggagagctagcgccctaagtacacgccgttgtggcagccggagagattttggcacccagctggtgtgatgtcgtggccgtcggaggagcgatggagcctggcggagggatagctgtcggagcgattgagtccttgctgacgtcctcttgcttccgtaagggggctgagagccgccgtcgtcacagagaatgcggggcgccatcattgcctgtctggcggagcgagccagatgggacgccagtcttgttccctgcggcccgagtcagctcagggtagggtgatgatggcgcctcctgttgacgtggccggtctgcgtcctaggttgggcgatgtggaagctcctccgaagccgaggtcgagtctgtcttccgtggctgaggtcgagtccgagcccctgggtcgggcgaggcggaggccagggcggagtccgagccctggggtcgggcggagcggagttcgccgtcttctggggcttagcccaagtccgagccctgggtcgggtggagcggagttcgccgtcttccgggacttagcccgactccgagccctgggtcgggcggagcggagttcgccgtcttcctggacttagcccgagtccgagccctgggtcgggcggagcggagttcaccgtcttccgggacttagcccgtgtccgagccatgggtcgggcgaagcagagtttcctatggtgccttcggcagggcctgaccgcctgttagtctcactctgtcaagtggcaccgcagtcggagtggcgcaggcggcgctgtccttctgtcaggccggtcagtggagcgacgaagtgacggcggtcacttcggctctgccggctggggggcgcgcgtcaggataaaggtgtcaggccacctttgcattaaatgctcctgcgatttggtcggtcggtgcggcgatttggtcagggttgcttcttggtgaagacagggcctcgggcgagccggaaatatgttcgccgctggaggggggcctcgggcgagacggaaaccctccggggtcggctgcccttgtccgaggctaggctcgggcgaggcgtgatcgagtccctcgaatggactgatccctgacttaatcgcaccatcaggcctttgcagctttgtgctggttggggttaccagctgagaattaggagccttgagggtacccctaattatggtccccgacacaaatacaatttgattcatacaattttttatgaactaccatttttccgcatgtatggctttaagttcttgataaacccaatgggtagaagggtgcccgatctttcgatgagagatgatggaggtggaaaacttgttggagaacgacgttggctgcccgactaccacaaccaagatggtgttgcgccttgagcgacaggtacaccgtctcctgataactacgatttggggtggaggtcgacgttgtgctatccgactacaacaaccacaagggtgctgcgccttagcgatagttacaccggctcctgttgttgctgctcttgccgtgccaagaacagccttgaacctgcaagcaatcgagaacaagcaagaacaagataacaagcaaacacgcaccgatctgataaagttggggtctcgtttcaagtattcgggtggtctagccgacacacgcgtttacaaggaagtagcaaaggctaaacttacatcaaacaaaacccccatgttctttggtggctgctagttgcttaaatagagaaataggaagaaggaattctggtggagtcatgaagttccctcggcagtttctggacgcctcaggtgtagtctcccattaattcttgatccaccagcaagtatacgaagggagctttccaacaagtatttatttgcattaaacggccttggaagttggaagatatgccccatttaaacttgtacttggtgctgttacgaaatcctctcgggtgcagcagcctttattgccttgttgccttctccagtccaagatggttcacctcccaaacacctgagcataataaagtcatcgcaaggctttagtacctcatttaaagaagaattagcttcaatagcaaggaacgagttcacgtgataattaagtttacgtgcacgggctcgtgtcattggtccttgattagctacgaatggtgaagtggtcactggtatggttgtatcaatgatggtgatgtcctcatcagttcttatcaattttcttttccacacgcttgattctctctggaccgttaaagacgaacatctcttcatacttattgtattcctcatcttcgtctcccacattctcaactccaacaattttttgctttccagaaataactacatgcatcttctcatctgctggatcgagtacatagaacacttgtgcaacacattcggcgagaacccacaggtcatctttatatcctactttctttaagtctaccagtgtgagtccgtagttatccactatcacccccacgggatgttgtacccattggcacttaaataagggtattttcatgcttgggccataatcaagttcccatatttcctctatgaatccaaaatatgtggtcttctgtccatgtaggtcaaaagcatcgatacgaacatcgctattttgtgcaacacttttcatgtcttttgatttagtgtagaatgtgtacccattgatgtcatatgcttgccatgatgtcacaaaacacgatggcccagaagccaaattcttcattgttttctcttccaaagagtctccgaatgggatgtttttgtccattaagcattcgctgaaacgatgtttgtgctccctcatgatccagtcccctgtgcggttctgattttctttacgaagctcatccaggtgttcctctatgtaaggctcggctatcatgagatgttgtatagcctctacacaggcggttccaggaaccgcttgtggtgcaccgcctgtacagaggtttactgtagtagtgaaacgagctttcaaatgggagagggcagtcttggactggccacctatgaaggcacaaagccttaaaaattctaaattcaatgatgttacacccggttttaataacaaacatgggcgcggatcaaatgtgtgttaagatcaaatctcacacatacgatgactcatggtatagaaatgaatgtcacgtttttattatatagtaggggttctatacaaaatatctaaataattacattatatgaagacaacgatccacctcaaccatagttgattgagaggcgacgacctagacctctcacgaactcatcgctgtatcattcatgctccttttcttgcggtacctattcctgacctggggggttgtgagtatagcaagagtgagctcacatacattcattgcattaataagttgtgggaaataatgtgcatgagatcacttatggtggggcccttgtgaagtgtaaggcttatcaacgaataagggttcaggctcagtattgcttttaataaattggtcaaaattttattagcatttactaagtataactagataccatcccattaagagaccacaattaataataaatcccataatgcaagtcaaacgacagattaaatttagtttcataaattaatcatgcaagagtcttgagtcattcttgactgtgagcacgacttatatactagttttacaccctgtagaggttgtgcatatttacccacaataagtgtttcccatttagcgatataggaatccctcgtccaaaaagctttacagacagtccgacctgaggacctccctatacctgcactcctccaccccggttgccccttttgggaaaggattaactcacactagctttcctaattagtcagccaagggtgttccattccacccttgtggtagcactgttatttcaagttaagctccatgttacaattaacacaatagtcttatcatgaaccataattaaaccaacaacaatagtggaacatgatcatagttcagtataacattaatcccaaaactaggtagagcaataacaagtctacccaattgttcatttgtttgcaaggtgtggggtaaacaaaactagggtaacctattgggtcccaacaaattaaactgagcatgtcatagtgattaacaggaacattattaggtaaagaagagtgattaagatcataacttgcctgtgacttgagattccaagtacttcaccaagttggtcttcgggtttctcgtgacctcgctgctatgcatagcaatacatacagtcaagcaaataatgggtatggtaacattacaccaaagcataagaacaaacagtgtaagaatattctacgcgctgctacgagatcataggttcgagaaccacaaaaaatcagagttacgattaaaaaagatatgatttcctaaagttttaggtgattaaatatattctatataaatcatgtgagaaaagatatatctaactcaacttttaatctaagttacaattaaattatattccagacaaattatagatgatccaaattaaaataatatactaactctagttaaattagttaatacaatagacataggttaaacaaattagttatttattttgagaacatgttacatgataaaataatgttacaaaagcatagggaatattattaagaagctaatgcaactggaacagactaaatcagattaaaatggtcaagttatgatttatctaagatttttagatttatttttatatcaaaaatcattttctagattttattttatgtaaataagttaaattttggacgacagataccaattccaagaaagtcagggtttattttataaaagtaaggacccgttggcattgatttttaaatggggctagattgtgggttgattcatataatctagaggggctctttggaaagattccctggccaaaggggtacgagccaactagagttgccctatccacatccaacggccccgattagaacctactttaaatgaaccggaatacaaccgggatcgtgggatccctgatgaaggcacctgattaaaaggtgaatcagacctattcataattgtttgatctctgatccgcagtccgtaatccgatgatggcgcgatctgatctaactcatccgatagccgatcaacggctcatatcaatgaatcgaagaggtatgtttcttttaatcaagagcgttcatcagaatccgatggtcatcactcacctcctcagccttgacgagagccagggcccgccggcctgaaaccattgcgtcgcgtttttttccacgggggcgccatggctgacaacaagcccgagcggctccccgtggacaaaactcggaatgaactagtgacaccgaggggcacaacaacctacatagattgtttcttacctctgttgtcagcgcagacgctcctgcccacggttgcgagcgacacgcagaaggaggattgctctgatgagcaattgtcgtttcctccgaccgtggtcgtcgcctgtgaagcacccaacatgcgtgacgaaaacctgggacacccaagtaccacccatcgaggttagggggtcacacacagggcggatcgacggcggcagcggtgctctctcatgacggtgcttacgcacggctccggtgatcccagctccacaacatggccacaatttttctctcatcaataggattgagtagaggggggatcatggccagttctatttatgagatgcagtggactaggattggattggggaaggatccaagcgggatccatggcggcgcccacaacattctggtagaggggataagcctgacatgatgggcacactggcagcaaaaccgagcgctcgacgttgaagacttgcgcacgacgtctggggctaagcggcaggccccgcatggctgacaggtggggtaggcctgtcggcgctgatctgttcatgtgccggtgcggaggtgcaggcttatcgagccaacgaggcagattcaaccttgagaggctgatatgtcttcttttttttcttatttttttctaaaatcctgattcctttcaatgtcagttttgaattccaaattcaaatttaatttgattctcaagcttcaattttaatgcaacatccaaagacccaacatgaaatgcataattccattttatttatcttattttatctattaaacaaagagtttcttaatatgaaacttatatacacaaaagacactattctaagaaaacaattcctcatatatcatcttaaatcttttgctgaatattctttaaacattaattctaaatagttttatttgtacaagaatttgtgattatttcctacgaagagatggttcctaggcactataatgaatagttttgctaattaaacaattgaaaatgtttctatgttctctgttttaaccttagtttagagtttttaacttcaagtttgaactaccaaagtttgaacctctttttttattttctttatacttttaaaatacatttaaactcaaatcttttggagaacctttataaatcccaaaatagggttttgaggtgttataaacgaggagtctgtgcatgggacggcaagtcacggtaagaccagtccaaccgaatgatggggcagctcggtgtcgtctcaattaatgcatctcttaagttgctgaccaccaaccatgttggaacctgatcagttggtacccattgtctgtttacatgtggtagcttctaattggttcgcgtgatcttgaattttaaaaaattgaaataacatttttataaaattagaatctagcttgtggtaacattgctcactccattgttgaatatatcaaaatggagaaagcacgacgttaaaatgcttgcaacatttatgtaggagtgttattttatgtttttgcgaggagtataatcgtagtgtcactgttgacaatctttggcgacttttagctaaaggagaggagagacaatttcttgctaatgataggaattatagattgcatatattgaaagtgatagagctagagtgcccgatctttcggtgagtggagataattccgatttggtggaagtagaccctcacgatccgactacgacgagcgaacccgaagcgccaatgcaatcgctgaaccaactcccaatggttaccgaccttgcttatgcgagatcggcctgatcacgaagatcgtttcctgtgcgcaatcgaagaacgaacaagaaaaagatgcgagcaatcttaatatcactcgaggtggagttctgaatcacagaggacaacacgtatttgtgtgtgttctggggtagctaaagctagatgtaaaacaaaactcaagttctaaatgaaacaggactctgactaaatagaggagaggcgtgaacagtaggtcgacgctacagtaccacgtttactgttcacgacttacctaggcgccccatccgggccttcctattggaccatcttctaatcttctgggccttcgttctttaacaacatgatgtagttcaattctcttgcacgagcctgagtcactggcccaagtggaagggtggcgcctggactagggaagatggtgcctgggctggagaaggtgctgctggtgtagatgtactcatgttggtgttgatgtcctcctcatcctccccttcttgaactgaagtcgtcctcgacggcaactcctcatcttctcccgcatacggtttcaaatctgcaacattaaaattagtggaaacaccaaacttcgcaggtaggtcaaggatataagcattagcattaatcttggttagtatcttaaaaggaccagcaacacgaggcatcaatttagaacggcgcaaagtaggaaaacgatcctttctcaaatgcaaccaaaccatatcaccaggttcaaaagtaactagtttctggcctttactaccaataatctgatatttagcattagcagcaacaatgttttgttgagtttgttcatggaggttaatcatttgttcaacatgtgcaacatcatctatgtgtggggcgtccgcagcatcaagcgaaaacaaagcaataggcgccctaggaatgtaaccataaacaatttgaaaagggcacatctttgtagaagaatgtgttgcatgattataagcaaactcaacatgaggcaagcaatcctcccaacatttcaaatttttgtctaaaatagccctaagcatggtagacaaagttcgattaactacctcagtttgaccatcagtctgagggtgacaagtggtgctaaacagcaatttagttcccaatttattccacagagatctccaaaaatgactgagaaacttagcatcacgatctgagactattgtattgggaatactgatgtagctgaggtgcccgatctttcggcgagtagagataattctgatttggcggaagatgacccttgcgatccgactacgatgagcaagcccgaggcgccaatgcaatcgctgaaccaactccctgtggttaccgaccttgctgatgcgagatcggcctgatcacaaagatcgtttcctgtgcgcaatcgaagaacgaacaagaaaaagatgcgagcaatctaatctattactcgagggtggagttctgaatacacgaagacagcgcagatttgcgcgtgttcgagagtagctaaggctaacgtaaaacaaaactcaagaaataaaggaggcgcagctcctggataaatagagaggtggcgcagcccctaggggcggccaaccctaggtcatccattatgggccgcagttgggctggtcgtctattcttcc

SEQ ID NO: 651 - DNA, 17981 bp, Zea mays
  VARIATION (8710)..(8710): /replace="c" or "g" or "t"
  misc_feature (8710): /note="Nucleotide given in the sequence has no preference with respect to those in the annotation for said position"
  source: /note="Zea mays BAC clone full insert sequence contig bacm.pk108.h15-2.fis48"
tttcccgattcgattctccaaaatggctcattttataccttgtcataagactgatgatgctagcaatgttgctgaattgttttttagagagatattcgtttgcacggtattcccaatacaatagtctcggatcgtgatgctaagtttctgagtcatttttggagatctctgtggaataaattgggaactaaattgctgtttagcaccacttgtcaccctcagactgatggtcaaactgaggtagttaatcgaactttgtctaccatgcttagggttgttttagacaaaaatttgaaacgttgggaggattgcttgcctcatgttgagtttgcttataatcatgcaacacattcttctacaaagatgtgcccttttcaaattgtttatggttacattcctagggcgcctattgctttgttttcgcttgatgctgcggacgccccacacatagatgctcttgcacatgttgaacaaatgattaatctccatgaacaaactcaacaaaacattgctgttgctaatgctaaatatcagattactggtagtaaaggccggaaactagttacttttgaacctggtgatatggtttggttgcatttgagaaaggatcgttttcctactttgcgccgttctaaattgatgcctcgtgctgctggtccttttaagatactaaccaagattaatgataatgcttatatccttgacctacctgcggagtttggtgtttccactagttttaatgttgcagatttgaaaccgtatgcgggagaagatgaggagttgccgtcgaggacgacttcagttcaagaaggggaggatgatgaggacatcaacaccaacacgagcacatctacaccagcagcaccttctccagcccaggcaccatctaccccagtccaggcgccaccccttccacctgggccagtgactcgggcccgtgcaagagaattgaactacatcatgctgttaaagaacgaaggcccggaagaatagacgaccagcccaactgcggcccataatggacgacctagggttggccgcccctaggggctgctccccctctctatttatccaggagctgcgcctcctttatttttcgagttttgttttagatctagctttagctaccctagaacacgcacaaatacgtgctgtcctctgtgattcagaactccacctcgagtgatattaagattgctcgcatctttttcttgttcgttcttcgattgcgcacaggaaacgatcttcgtgatcaggccaatctcgtagcagcaaggtcggtaaccattaggagttggttcagcgattgcattggcgcttcgggatcgctcgtcgtagtcggatcgtgagggtctacttccaccaaatcggaattatctccactcaccgaaagatcgggcactccagctctatcagaacttgcccaatccaatactttaggtccaaaacacatgtttggggtggtttcgcacaatttcgttgccgcacgtcacccattctgaaaatgggtgtcggggtgcttacaagcacgagtttttgccacagaaaccatttcttcgtttttcgcaacgaacatgcccaatccactactttaggtccaaaacacatgtttggagtggtttcgcgcaattttattgccgcacgtcacccattctgaaaacgggtgtcggggtgcatacaaagcacgagtttttgccaatggaaccatttcttcgtttttcgcaacaagcatgcccaatccactactttaggtccaaaactcatgtttggggtggtttcacgcaatttcgttgccgcacgtcacacattccaaaaatgggtgtcggggtgcaaacaaagcacaagtttttgccactggaactatttcttcgtttttcacaacgaacatgcccaatccactactttaggtccaaaacacatgtttggggtggtttcgcgcaatttcgttgccgcacgtcacccattccgaagacgggtgtcggggtgcatacaagcacgagtttttgccaccggaaccatttcttcgtttttcgcaacgaacatgcccaatccactactttaggtccaaaacacatgtttatggtggtttcgcgcaatttcattgcctcacgtcacccattccgaaaacaggcgtcggagtgcatacaaacacgagtttttgccaccggaaccatttcttcgtttttcgcaatgaacatgcccaatccacttctttagctccaaaactcatgtttggggtggtttcgctcaatttcgttgccacacgtcacccattccgaaaacaggtgtcggggtgcatacaagcacgagtttttgccaccggaaccatttacttcgtttttcgcaacgaacattgatgtagcttaggtgcccgatctttcggcgagtagagatattttccgattttggcggaagatgacccttgcgatccgactacgacgagcaagcccgaggcgccaatgcaatcgctgaaccaactccctgtggttaccgaccttgctgatgcgagatcggcctgatcacgaagatcgtttcctgtgcgcaatcgaagaacgaacaagaaaaagatgcgagcaatctaatctattactcgagggtggagttctgaatacacgaagacagcgcagatttgcgcgtgttcgagagtagctaaggctaacgtaaaacaaaactcaaggaataaaggaggcgcagctcctggataaatagagagggggcgcagcccctaggggcggccaaccctaggtcgtccattatgggccgcagttgggctggtcgtctattcttccgggccttcgttctttaacagcataatgtagttcaattctcttgcacgggcccaagtcactggcccaggtggaaggggtggcgcctggactggggaagatggtgcctgggctggagaaggtgctgctggtgtagatgtgctcgtgttggtgttgatgtcctcatcatcctccccttcttgaactgaagtcgtcctcgacggcaactcctcgtcttctcccgcatacggtttcaaatctgcaacattaaaactagtggaaacaccaaactccgcaggcaggtcgagggtataagcattatcattaatcttggttagtatcttaaaaggaccagcagcacgaggcatcaatttagaacgacgcaaagtaggaaaacgatcctttctcaaatgcaaccaaaccatatcaccaggttcaaaagtaactagtttccggcctttactaccagtaatctgatatttagcattagcagcagcaatgttttgttgagtttgttcatggagattaatcatttgttcaacatgtgcaagagcatctatgtgtggggcgtccgcagcatcaagcgaaaacaaagcaataggcgccctaggaatgtaacataaacaatttgaaaagggcacatctttgtagaagaatgggttgcatgattataagcaaactcaacatgaggcaagcaatcctcccaacgtttcaaatttttgtctaaaacagccctaagcatggtagacaaagttcgattaactacctcagtttgaccatcagtctgagggtgacaagtggtgctaaacagcaatttagttcccaatttattccacagagatctccaaaaatgactcagaaacttagcatcacgatccgagactattgtattgggaataccgtgcaaacgaataatctctctaaaaaacaattcagcaacattgctagcatcatcagtcttatgacaaggtatgaaatgagccattttggagaatcgatcaacaaccacaaaaatgctatccctccccttcttagttctaggcaatcccaaaacaaaatccatcgaaatatcaatccaaggggaagtaggaacaggcaaaggcatatacaaaccatggttgttcaaccgtgacttagctttctgacaagtagtgcagcgtgcaacaaggcgctcaacatcagcgcgcattcgaggccaaaagaagtgggcagccaacacctcatgtgtcttgtagacgccaaagtgccccatgagaccgcctccatgtgcttcctgtaacaacaaaagacgaaccgagctagctggaacacacagcttgttagcgcgaaacaggaacccatcctgtatgtaaaatttgccccatggtttcccattaatacaatggccgaaagcatctttaaaatcagcatcatcaacatattgatctttcacagtgtgcaaaccaaagattttaaaatctaactgtgacaacatggtatagcgacgagacaaagcatcagcaataacattgtccttcccgttcttgtgtttaataatgtaaggaaaggactcaatgaattctacccatttagcatgacgacggttcagatttgtttgggcgaatatgttttaaagcctcatgatcagaatggattataaactcacgatgccaaagatagtgctgccatgtatgcaaagtgcgcactaaagcgtaaagctccttatcataagtagaatatttcagactagcaccgcttaatttttcactaaaataagcaactggttttccttcttgtaacaaaacagcacctagcccaataccgctagcatcgcattcaagctcaaacactttattaaaatcaggcaattgcaatagaggagcttgggttaacttatctttcaaagtgctgaacgcttcctcctgggaatcactccaagcaaatggcacatctttctttgtaagctcatgtagaggcgctgcaatggagctaaaatcacgaacaaatctgcggtagaaaccggcaagtccaagaaagctccgaatttgtgtgaccatcgtcggtgtaggccactcccgaatggcagcaatcttgctgctatccacctcaatgccctgtggagtaacaacataaccaagaaacgagacacgtcatgtacaaaagatgcatttttccatgttagcaaataactgggcagcacgcaatgcatcaaaaatagcacgtaaatgttccaaatgctctttcttagatttgctgtaaataagaatatcatcaaaataaacaaccacaaacaatcctatgaagggccttagaacttcattcatcactcgcataaaagtgctgggagcattagtcaatccaaacggcataaccaaccattcatataaaccaaattttgttttaaaagccgttttccattcatcacccagtttcattctaatctggtggtaaccactacgcaaatcaatcttagtgaaaataatggcaccactaagctcatctagcatatcatcaaggcgtggtataggatatcgataacgaatagtgatgttattaatagcacgacagtctacacacatatgccatgacccatctttcttgggaacaagtaacacaggaacagagcaagggctaagagactcacgaatgtatcccttgtcaagcaacgcctgtacctggcgctgaatctccttcgtctcatccggatttgtacggtacggtgcgcggttcggcagctgtgcgccgggaatgaggtcgatctggtgctcaatgccacgaagtggtgggagacccggtggtaagtctttgggaaagacatcagcgtactcctgcaaaaggttagcaaccatagggggaatagccaaagatggtgcatcatcaagtgaaatgaggacactagagcatataagtgcatagcatggcaaatgagcaccgtgtagatcatcaaaatcagcacgtgtagcaagtaaaacaggagccttcaacttgatttcagaaggagcagatggcgatggatcaagttgtttagcagttatagcagctcgggcaagatcatctttaacaatttgttcaggtgtcattggatgtataattattttctgacccttaaaaatgaaagaataatgattcgaacgaccatgatgcaagctatcagtatcatattgccaaggtcgaccaagtaacaaagagcatgcttccatgggaataacatcacaatcaacaaaatcagaataagcacccatggagaaaggaacacgcacagaacgtgtaatttttattttaccaccatcattaagccattgaatgtgatatgggtttggatgcttacgagtgggtaacgataacttttcgaccagcatggtactcgccaaattgttgcaactgccactgtcgataatgatgcgaattgaccgctcctgcacaacaccctttgtatggaacagagtgtgtcgctgattcttctcgggcaaagcgacctgtgtactgagaacacgctgcacaacaagactttcatacctatcagcgtcgctcgggttgacatgtacctccgccttagctgcatggtcagtggcaagtagtgcatgttcaatttcttcagaatcactagcggaagagtactcaccatcgtcacgaatgagcaaagtgcgcttgtttgggcagtcccgaatcacatggccaaatcctctacaacgatgacactgaatatcccgtgtacgacctgtgggtggggcagtgctggctggattggtcgtcttctcgcgtggagtagtggtggacgtggatggcgcagggggaactggtgctgaggtggatgtcgagcttcgtcctgcaaaagggttagaatatggcttcgagcggcgtccctgcacttcacgttcagctttacaagcatattcaaataaagtagtcatatcataatattccttataatcaagtatatcttggatttcgcggtttaaaccaccacgaaaacgtgccatagcagcgtcgttgtcctctaatatcccacaacgaatcatacctttttgtaactcctggaaatagtcctcaacagattgagaaccttgctgaaaacgctgcattttattaagcaaatcacgagcataatacgaaggcacaaatcgatgtcgcatcgcagctttcaactgatcccaagtggttggaatggtagtgggatgttttattttaaactcacgccaccaaattaaagcaaaatcagtaaattcactaatagcagctttaacctgagaatgtgcagcaatatcatggcatgaaaatttttgttcaacctctaactcccaatcaagatatgcagcaggatcatatttgccattaaaaggtggaattttaaatttaatcttagaaaataagtcattagggggatgacgaaccacacggcgtgcacgaccacggcgatctccatcttcccactcagtgtcaccgccgtagtcctgctccatctttgtggtcaacgcatcaaggcgtgccaggatggtgtcgagtgtggtgcgagtcgctgtttgagcaaggtcaagctggttgaaacgctcggtcgtcgaagtgaccgttgaatcaagccgttcatgcattgtcataatgtcatcagcaagtccatcaacttgtccccttacttccagcaactgggcatttaccgtgtcgtgtgctcctgccatagttagcgcaaacaccaaaacaccaaaagaagaagaaaaaaacaacgacaaaaacaggggtgtactgctcacaaggcgctcacactagtgctgttatcaagttcttattcattcttaccaagccacagtggtgaactgcaaccaacaggtggaaacggtgaaagattggatgagtgattgcctggagaaacagaagcctgctcgtcgtagaaatatgtggagttctgggtaggctgcactcaagtcaatgattagcacaatcaaacaataatgcaaagttgaattatagtgcagaacacgaaactatattgctggccacaagtgcaaaggacggatggaactagcagaatggcagtaccgtaaatattgtactagcgaggccactagtaggaatcacaagtgattttgtttttcttttttgtatgatttttttgatatttttctcagcacaagaagcaacaaaataggagctagacgaagtttcaccgaaaacagagatcagatgtggtctacagaaaatcaggaagttctctgaaaagcgtgcgagaactttgacggatttttttctttattttcctgaatttttttgacaatttcgtcgaaaccaaacagaccgaaaggtcagtttggccggcctcagaatggtgtcaactagctcctgtaaaaatttcagattttttggacacccaagcgaaaagttatgcccggtttaaggaaggtacctcaaattatgttttcaaacgaccgggatgaaacaaccgtatcctttctccttcgttgttttttgtttctgttttattttttgacgtaaccgaaggagaaaaacaaggaaacgatgttgactcggtttgtttttttttctgttttttttcgtaaccgaaggagaaaaacaaggaaacggccgttgactcggtttgtttttttctgtttttttttacgtaaccgaaggagaaaaacaaggaaacgatgttgacttagtttgtggcgtgatcaaaggggagatggtggcggcgctagggtttgaatggtggaagaacacaatgcaaccagcaacaaatgacgcgaaagcacacaaattcaacaatgcagattattgaaagaaagtgcgaggctcaaaaggtgctgggataagatctaacctgaatttttatgtggttttgtggactgtaggaaaaaaacgctcgataaactcaccgatcaacctggaaatctgtcggggaccataattaggggtaccctcaagacgcctaattctcagctggtaacccccatcagcataaagctgcaaaggcatgatgggtacgattaagtcagggatcagtccacacgagtgacttgatcacgcttcgctcgtgcctagcctcggccaagggcagccgacctcgagagacttccgtctcgcccgaggcccccctttttaacggcggacgcacctccggctcgcccgaggccttggcttcgcctagaagcaaccctgactaaatcgccgcgccgactgaccaggttgcaggagcatttaacgcaaaggtggcctgacacctttatcctgacacgcgccccccagcagagccgaagtgaccgccgtcactccaccgctccactgaccagtctgacagaagaacagcgccgcctgtgccacaccgactacagtgccactcgacagagtgagtctgacaggcagtcaggccctgccgaaggcgccatgggaaactccgctccgcctgaccccagggctcggactcgggctaagacccggaagacggcgaactccgctccgcccgaccccagggctcggactcgggctaagacccggaagacgacgaactccgctccgcccgaccccagggctcggactcgggctaagacccggaagatggcgaactccgctccgcccgaccccagggctcggactcgggctaagacccggaagacggcgaactccgctccgcccgaccccagggctcggactcgggctaagacccggaagacgacgaaactccgcctcgcccgaccccagggctcggactcgggctaagacccggaagacgacgaaactccgcctcgcccgaccccagggctcggactccgccctggcctcggccaaacgatctccgcctcgcccgaccccagggctcgggctcggcctcggcaacggaagacagactcgacctcggcttcggaggagcccccacgtcgccctgcctagggcacaggcccgccacgtcaacaggaagcgccatcatcgtcctaccccgaatcgactcgggtcacggagaacaagaccggcgtcccatccggccagctccgccggatgggcaatgatggcgctccacgagctctgtgacgacggcggccctcagctctcttacggaagcagggcgacgtcaacaaggacccgaccgctccaacagctgtccctccgccaggctccgtcgctcctccgacagccacgacatcacgccagcaaggtgccaagacctctccggctgccacattggcatgtacctagggcgctagctctctctccgctagacacgtagcactctgctacaccccccattgtacacctggatcctctccttacgattataaaagggaggaccagggccttcttagaggaggttggtcgcgcgggaccgaggacgagacaggcgctctcttggggccgctcgcttccctcacccgcgtggacgcttgtaacccccctactgcaagcgcacccgacctgggcgcgggacgaacacgaaggccgcgggacctccacctctctcacgcccgtctccggccacctcgcctctccccccttcgcgctcgcccacgcgctcgacccatctgggctggggcacgcagcacactcactcgtcggcttagggacccccctgtctcgaaacgccgacagttggcgcgctaggtaggggcctgctgcgtgctgacgaacagcttcccgtcaagctccagatgggcagtctccagcaacctctccggcccgggacggtgcttcgtttcgggactcttgagttcatgtccttcgacggcagctacgacatgatactccttcctccgccgcgcgacaacgacaatggcggccgacaacccgcccgccggcggcggaatcggcgacatcttccccgcgtggtggaagaacaacatccgagctcgctccgtcccctcccccgccaacggaggaggaggcgaggcaaccaaggccaagcgggaggccgcgcttcgtcgactgtcgagcgaatcgacgtccccagcgccccgatggaaggcacgccgggcgtcgacctcgcattcgagacggaggcaggcgtcgtccccccacgacacgctgatctcaagcaagaagacgacgcccaacgcgctcgtggaaagcctgcaggacgtcgccctcgtacctgagacgacggtgcaaccagtccccgatgtgactacgtcgctcctcgtcgaccaaaaggtaccgactaactcctatcttacgtcatttcgactcggcctcaacccgccaaacgacctcgctttggcgggcgctctcatcgaggcgagtgcaaccccactggggtttcgtatgcggtcgccttgggaccggttgacggacgtctcaacctacgggccctctgggtccgaggaagatgacgatcccagcatctgttgggatttctccggacttggcaaccccagtgccatgcgggacttcatgaccgcatgtgactattgcctctccgactgttccgacggaagccgcagccttggcgacgagagctgcggcccaagacgcgaatgtttccacatcgagctaggggatccctccgaaggcaaccatctcggcatgccggaggacggtgatcttcctaggccggtgcctcgcgccgacatcccacgggagctagctgtggtccccgctccggcggggggttacgacccacaactcgagcaagtccgcgaggcgcaggccaggctcaatgagggaacaggagcgcttgagccgatccgtcgggacgtcgggcaggtatgggcgggccaacccccggccggagaaatacgtcacctgccccaaggtctccagcaccgcgtcgccaacgatgtcagggtcaggccgccgcccgcatctagcggggttggccagaacctggcagccgcagcgatgctcctccgcgcgatgccggagccatcaaccaccgagggtcggcgaatccagggagagctcaagaatctcctggaaggcgctgcggcccgacaggccgagagcactgcctcccgaaggcaggggtacccctcggaacctcatgacgcgacttcccgattcatgcgggaagcctcggtctacaccgggcgcacgcgtaacaccgcgcctgcggccccgggccacctcggcaacgagcaccatcgacgcgaccgtcgggcccacctcgacgaaagggtgcgccgaggctaccaccccaggcgtggggggcgctacgacagcggggaggatcggagtccctcgcccgaaccacccggtccgcaggccttcagtcgggccatccgacgggcgtcgttcccgacccggttccgacccccgactactatcacgaagtactcgggggaaacgagaccggaactgtggctcgcggactaccgccttgcctgccaactgggtgggacggacgacgacaacctcatcatccgtaacctccccctgttcctctccgacactgctcgcgcctggttggagcacctgcctccggggcagatctccaactgggacgacttggtccaagccttcgccggcaatttccagggcacatacgtgcgcccgggaaattcctgggaccttcgaagctgccggcaacagccgggagagtctctccgggactacatccggcgattctcgaagcagcgcaccgagctgcccaacatcaccaactcggatgtcatcggcgcgttcctcgctggcaccacttgccgcgacctggtgagcaagctgggtcgcaagacccccaccagggcgagcgagctgatggacatcgccaccaagttcgcctctggccaggaggcggtcgaggctatcttccgaaaggacaagcagccccagggccacccatcggaagaggctcccgaggcgtctgctccgcgcggcgccaagaagaaaggcaagaagaagtcgcaatcgaaacgcgacgccgctgacgcggaccttgtcgccgccgccgagcacaagaaccctcggaagccccccggaggtgcaaacctcttcgacaagatgctcaaggagccgtgcccctaccatcaggggcccgttaagcacaccctcgaggagtgcgttatgcttcggcgtcacttccacagggccgggccacccgccgagggtggcagggcccgcgacgacgacaagaccgaagatcaccaagcaggagaattccccgaggtccgcgactgcttcatgatctacggagggcatgcggcgaatgcctcggctcggcatcgcaagcaagagcgccgggaggtctgctcggtgaaggtggcggcgccagtctaccttgactggtccgacaagcccatcaccttcgaccaggccgaccaccccgaccatgtgccgagcctggggaaatacccgctcatcgtcgaccccgtcgtcggcaacgtcaggctcaccaaggtcctggtggatgggggcagctgcctcaacatcatctacgccgagaccctcaagctcctgcgcgtcgatctgtcctccgtccgagcaggcgctgcgcccttccacgggatcatccctgggaagtgcgtccagcccctcggacgactcgacctccccgtctgcttcgggacgccctccaacttccgaagggagaccctgacgttcgaggtggtcgggttccgaggaacctaccacgccgtactgggggaggccatgctacgcgaagttcatggccgtccccaactacacctacctaaagctcaagatgccgggccccaacggggtcatcaccgtcggccccacgtacaaacacgcgttcgaatgcgacgtggagtgcgtggagtacgccgaggccctcgccgagtccgaggccctcatcgccgacccggaaaacctctccaaggaggtgccagacgtgaagcgccatgccggcaacttcgagccagcggagacggttaaggccgtccctcttgaccccagcggggacacctccaagcagatccggattgggtccgggctcgaccccaaataggaagcagtgctcgtcgactttctccacgcaaacgccgacgtctttgcgtggagtccctcggacatgcccggcataccgagggatgtcgccgagcactcgctggatattcgggccggagcccgacccgtcaggcagcctctgcgccgattcgacgaggagaagcgcagagtgataggcgaggagatccacaagctaatggcagcagggttcatcaaagaggtattccatcccgaatggcttgccaaccctgtgcttgtgaggaagaaaggggggaaatggcggatgtgtgtagactacactggtctcaacaaagcatgtccgaaggttccctaccctctgcctcgcatcgatcaaatcgtggattccaccgctgggtgcgaaaccctgtccttcctcgatgcctactcagggtatcaccagatccggatgaaagagtccgaccagctcgcgacttctttcatcacgccattcggcatgtactgctatgtcaccatgccgttcggtttgaggaatgcgggcgcgacgtaccagcggtgcatgaaccatgtgttcggcgaacacatcggtcgcacggtcgaggcctacgtcgatgacatcttagtcaagacaaggaaggcttccgacctcctctccgaccttgaagtgacattccgatgtctcaaggcgaaaggagtcaagctcaatcctgagaagtgtgtcttcggggtgccccggggcatgctcctggggttcatcgtctctgagcgaggcatcgaagccaacccggagaagatcgcaaccatcaccagcatgggacccatcaaggacttaaaaggcgtacagagggtcatgggatgcctcgcggccctgagccgcttcatctcacgcctcggtgaaagaggtctgcctctgtaccgcctcttaaggaaggctgagtgtttcgcttggacccctgaggccgaggaagccctcgggaacctgaaggcgctccttacaaaggcgcctgtcttggtgcccccggcggatggagaagccctcttggtctacgtcgccgcgaccactcaggtggttagcgccgcgattgtggtcgagaggcaagaggaagggcatgcactgcccgttcagaggccggtctacttcgtcagcgaagtgctgtccgagaccaagatccgctacccacaagttcagaagctgctgtatgctgtgatcctgacgaggcagaagttacgacactacttcgagtctcatccggtaactgtggtgtcatccttccccctgggggaaatcatccagtgccgagaggcctcgggcaggatcgcaaagtgggcggtggaaatcatgggcgaaacgatctcgttcgcccctcggaaggccatccagtcccaggtgttggcggacttcgtggccgaatgggtcgacacccagctgccgacggctccgatccaaccggagctctggaccatgtttttagacgggtcgctgatgaagacaagagccggcgcgggcctgctcttcatctcgccccttggaaagtaccagcgctacgtgctacgcctccatttcccggcgtccaataatgtggctgagtacgaggctctggtcaacgggttgcggatcgccatcgagctaggggtcagacgcctcgacgcccgcagtgactcgcagctcgtcatcgaccaagtcatgaagaactcccactgccgcgacccgaagatggaggcctactgcaatgaggttcgacgcctggaagacaagttcttcgggctcgagctcaaccacatcgctcggcgctacaacgagactgcagacgagctggctaaaatagcctcggggcgaacgacggtccccccggacgtcttctcccgggatctgcatcaaccctccgtcaagatcgacgatgctcccgagcccggggcaccctcggcacagcccgaggcaccctcggtacagcccgaggcaccctcggcccccgagggtgaggcactgggcgtcgaggaagagcagagcggggccacgcctgatcgagattggcaggccccgtacctgcaatatctccgccgaggagagctaccccccgaccaagccgaggctcggcgggtagcacgacgcgccaagtcgttcgtcttgctgggcgacgaggaggagctctaccatcggagcccctcgggcatcctccagcgatgcgtctccatcgccgaaggtcaggaactcctgcgagaaatacactcgggggcttgcggccatcatgcagcgcctcgagcccttgtcgggaatgctttccggcaaggcttctactggccaacagcggtggctgacgccactagaattgtccgcacctgcgaagggtgccaattctatgcgaagcagacccacctgcccgctcaggctctacagacgatacccatcacctggcccttcgctgtatggggtctggacctcgtcggtcccttgcagaaggcgcccgggggctatacgcacctgctggtcgccaccgacaaattctccaagtggatcgaagtccgacccctgaacagcatcaggtccgagcaggcggtggcgttcttcaccaacatcatccatcgcttcggggtcccaaactccatcatcaccgacaacggtacccagttcaccggcaaaaaattcttggatttttgcgaggatcaccatatccgggtggactgggccgccgtggctcatcccatgtcgaatgggcaagtagagcgtgccaacggcatgattctacaagggctcaagcctcggatctacaacgacctcaacaagttcggcaagcggtggatgaaggaactcccctcggtgatctggagcctaaggacgacgccgagtcgtgccacgggtttcacgccgttcttcctggtctacggggccgaggctatcttgcccactgacctggaatacggctccccgaggacgagggcctacaccgaccaaagcaaccaagctagccgagaagactcgctggaccagctggaggaggctcgggacagggccttactacactcggcgcggtaccagcagtccctgcgacgctaccacgcccgaggggtccggtcccgagacctccagatgggcgatctggtgcttcggctgcggcaagacgcccggggaaggcacaaactcacgcccccctgggaggggccattcgtcatcgccaaagttctgaagcccggaacatacaagctggccaacaatcaaggcgagatctacggcaacgcttggaacatcaaacagctacgtcgcttctacccttaagatgtttccaagttgttcatatacctcgcacctacgcaaagtttagtcgtcaaggaagggtcgacctagcctcggcaaagcccgaccctccctcgggggctaaaaggggggagaccccctctgcgtcgaatttttcctcgaaaaaggatctctttttagcaggatttctttcgtgcttcttgactacttcggaaagcggatcctggaaacgacggagtacacgtaagcagccaaggctgaccgagccgagggactcctacgcctccgggatacggatacctcactcatcaccttctgcgataagtaactcgcgttcggataaagcgactccgtggaccgaacaagtcttcacgttcggaagctctcctgccgaagcagtccttcaagctttctcgactaagtcggggacagggcctcacggatgggtgaaagtacgcgtaagcggcaaggccgaccgagccgagggactcccacgcctctgggatacggatacctcactcgtcccttccgcgagaagcaactctcgcccacacaaacatccctgttaccggcagagagtccagatgctcgaaacaagaggaaaaagacgcagctttgcaagcacggcgagggtgtgttttctggcctcggcggccgcagaaggcacacgctacatgacgatctgatcctgcaggctcgggtcttcacgctgaagggagccgtagcaccctcggcatcgacggcgtcttcagcaaagtccgacccagcctcggatggcggcgcgatcagagactcctctgggaatccggcccgagcaggcggctcggccggttacccctggggcctcggccgaccggcttccaagggcgccagcccgacccgaggcctcggctgatcgactccggcgtcggctccgctgacggacaacccggctaggctccggccaaccaggttcccattctcgagccaactccgcctctgttcatactggtatcgctacccctggcctcggctcatcgaagagcggccgaggggtctctttaactaagctagaggagccccagacaacaaggccgatcaagccgagggattcctacgcctccagatacggatacctcactcctcac

SEQ ID NO: 652 - DNA, 1041 bp, Zea mays
  source: /note="Zea mays BAC clone full insert sequence contig bacm.pk044.a19.fis1"
ccccaaaactgaggttttttgggccctaaaaattggggggtttggggccatttttttttggaaaaaaaaggaagaaaaggttttcgggggcaaaaattttggggttttggtttgcggggggaccaaccgttttccaaatgggggacggggggcaaggaattttacgaaacccccttcaataagaggtttggcctaaaatagtggttgggcagtttcgtgggaaaacgaagaaatgatccggtgcaaaaacacggcttgtatgcaccgacaccgtttttgaatggggacgtcgacacgaaatgtgcgaagcacccaaacaagagttttgacctaaagtagtggatgggcatgttcgttgcaaaaacgaagaaatggttccggtggcaaaaactcgtgcttttatgcaccccgatacccgtttttggaatgggagacgtgcgacaacgaaattgcgcgaaaccacctcaaacatgagttttggacctaaagtagtggattgggcatgttcgttgcgaaaaacgaagaaatggttccggtgacaaaacctcgtgcttatgcaccccgacacccgttttcggaatgggtgacgtgcgacaacaaaattgcgtgaaaccaccccaaacatgagttttggacctaaagtagtggattggacatgtttgttgcgaaaacgaagaaatggttccgatgggcaaaactcgtgctttgtatgcacccctcgacaaccgttttcagaatgggtgacgtgcggtaacgaaattgcgcgaaacaccccaaacatgagtttttggacctaaagtaatgaattgggcatgtttagtgccaaaaacaaaaaattgttttcggtggcaaaaactcgtgctttgtatgcaccccaacacccgttttcggaaagggtggaatgggacaacaaaaatttcccgaaaaccccccccaaactggaaattttgggccccaaaatatggggatttgcgcctttttcttttcccaaaaaacaaaaaaaatgggtttccgggggggaaaaaaatcccgggctttttt

SEQ ID NO: 653 - DNA, 766 bp, Zea mays
  VARIATION (691)..(691): /replace="c" or "g" or "t"
  misc_feature (691): /note="Nucleotide given in the sequence has no preference with respect to those in the annotation for said position"
  source: /note="Zea mays BAC clone full insert sequence contig bacm.pk044.a19.fis2"
ttcgcaacgaacatgcccaatccactactttaggtccaaaactcatgtttggggtggtttcacgcaattttgttgtcgcacgtcacccattccgaaaacgggtgtcggggtgcataagcacgaggttttgtcaccggaaccatttcttcgtttttcgcaacgaacatgcccaatccactactttaggtccaaaactcatgtttgaggtggtttcgcgcaatttcgttgtcgcacgtctcccattccaaaaacgggtatcggggtgcataaaagcacgagtttttgccaccggaaccatttcttcgtttttgcaacgaacatgcccaatccactactttaggtccaaaactcttgtttggggtgctttcgcacaatttcgttgtcgcacgtcacccattccaaaaaccgggtgtcgggtgcatacaaagcacgtgtttttgccaccggaatcatttcttcgtttttcgcaacgaacatgcccaatccactactttaggtccaaaactcttgtttgaggtggtttcgtacaatttcgttgccgcacgtcacccattgtgaaaacggttgtcaccccgcatacaaagcacgagattttgccaccggaaccatttcttcgtttttcgcaatgaacatgcccaatccactactttaggtccaaaactcatgtttggggtggtttcccgcaatttcattgccccacgtcacccattctgaaaacggttgtcgggtgcatacaaaacacaaatttttgcccccggaaacattt

SEQ ID NO: 654 - DNA, 1128 bp, Zea mays
  source: /note="Zea mays BAC clone full insert sequence contig bacm.pk044.a19.fis3"
ggtttgggcatgtcgttgcgaaaaacgaagaaatggttccggtggcaaaaactcgtgctttgtatgcaccccgacaaccgttttcagaatgggtgacgtgcggcaacgaaattgcgcgaaaccaccccaaacatgagttttggacctaaagtagttgattgggcatgttcgttgcgaaaaatgaagaaatggttccggtggcaaaaactcgtgctttgtatgcacccgacacccgtttttggaatgggcgacgtgcgacaacgaaattgcgcgaaaccaccccaaacatgagttttggacctaaagtagtggattgggcatgttcgttgcgaaaaacaaagaaatggttccggtggaaaaactcgtgctttgtatgcacccgacacccgttttcggaatgggtgacgtgcgacaacgaaattgcgagaaaccaccccaaacatgagttttggatctaagtagtggatggggcatgttcgttgcgaaaaacgaagaaatggttctggtggcaaaaactcgtgcttgtatgcacccgacacccgtttttggattgggtgacgtgcggcaacgaaattgcgcgaaaccaccccaaacatgagttttggacctaaagtagtggattgggcatgttcgttgcgaaaaacgaagaaatggttccggtggcaaaaactcgtgctttgtatgcacccgacaacccttttcagaatggttgacgtgcgtcaacgaaattgcgcgaaaccaccccaaacatgagtttcagacctaaattagtggattgggcatgttcgttgcgaaaaacgaagaaatggttttggtggcaaaaactcgtgctttgtatgcacccgacaccgtttttggattgggtgacgtgcggcaacgaaattgcgcgaaaccaccctaaacatgagttttggacctaaagtagtggattgggcatgttcgttgcgaaaaacgaagaaatggttccggtggcaaaaactcgtgcttttatgcacccgacacccgttttccggatggggtgacttgcggccaccaaattgcgtgaaaccacccccaaaaaggaatttttgaacccaaaagtaatggaattggggcacgtttcctttgcgaaaaaaccgaaaaaaatgg

SEQ ID NO: 655 - DNA, 1437 bp, Zea mays
  VARIATION (1410)..(1410): /replace="c" or "g" or "t"
  misc_feature (1410): /note="Nucleotide given in the sequence has no preference with respect to those in the annotation for said position"
  VARIATION (1426)..(1426): /replace="c" or "g" or "t"
  misc_feature (1426): /note="Nucleotide given in the sequence has no preference with respect to those in the annotation for said position"
  VARIATION (1429)..(1429): /replace="c" or "g" or "t"
  misc_feature (1429): /note="Nucleotide given in the sequence has no preference with respect to those in the annotation for said position"
  source: /note="Zea mays BAC clone full insert sequence contig bacm.pk044.a19.fis4"
cgacggtatcgttactttagttgcgcccatccactacttagatccaaaactcatgtttggggtggtttctcgcactttcgttgtcgcacgtcacccattccgaaaacgggtgtcgggatgcatacaaagcacgagtttttccaccggaaccatttctttgtttttctcaacgaacatgcccaatccactactttaggtccaaaactcatgtttggggtggtttcgcgcaatttcgttgtcgcacgtcacccattccgaaaacgggtgtcgggatgcatacaaagcacgagtttttgccaccggaaccatttttttttttttcgcaacgaaaatgcccaatccactactttaggtccaaatctcatgtttggggtggtttcgcgcaattttgttgtcgcacgtcacccattccgaaaacgggtgtctggtgcatacaaagcacgagttttttgccactggaaccatttttttttttttcgcaaaaaaaatgcccaatccactactttaggtccaaaactcatgtttggggtggtttctcgcaatttggttgccgcacgtcacccattccgaaaacgggtgtccggtccataaaagcacgagtttttgccaccagaaccatttcttcgtttttcgcaacgaacatgcccaatccactactttaggtccaaaactcatgtttggggtggtttcgcgcaatttcgttgccgcacgtcacccattccgaaaacgggtgtcgggtgcatacaaagcacgagtttttgccaccggaaccatttcttcgtttttcgcaacgaacatgcccaatccactactttgggtccaaaactcatgtttggggtggtttctcgcaatttcgttgccgcacgtcacccattccgaaaacgggtgtcgggtgcataaaagcacaagattttgccaccagaaccatttcttcgtttttcgcaacgaacatgcccaatccactactttaggtccaaaactcatgtttggggtggtttctcacaattgcgttgtcgcacgtcacccattccgaaaacgggtgtcgggtgcatacaaagcacgagtttttgccaccggaagcaattcttcgtttttcgcaacgaacatgcccaatccactactttaggtcctaaactcatgtttggggtggtttcccgcaattacgttgtcgcatgtcacccattccgaaaactggtgtcggggtgcatacaaagcacgagtttttgccaccggaaccatttcttcgtttttcgcaacaaacatgcctaatccactactttaggtccaaaactcatgtttggggtggtttcgcgcaatttcgttgtcgcacgtcacccattccgaaaacaggtgtcgggtgcataaaaccacaagttttccccccgaaaccgtttctctcattggtttagataccgtcgactcggaaacaagctcaaa

SEQ ID NO: 656 - DNA, 1620 bp, Zea mays
  source: /note="Zea mays BAC clone full insert sequence contig bacm.pk044.a19.fis5"
caatttcgttgtcgcacgtcacccattctgaaaagggttgtcgggtgcatacaaagcacgagtttttgccaccggaaccatttcttcgtttttcgcaaagaacatgcccaatccactacttttggtccaaaattcatgtttggggtggtttcacgcaatttcgttgccgcacgtcacccattccgaaaacgagtgtcgggtgcataaaagcacgagtttttgccaccggaaccatttcttcgttttccgcaacgaacatgcccaatccgctactttagatccaaaactcatgtttggggtggtttcgcgcaatttcattgtcgcacgtcatccattctgaaaatggttgtcgggtgcatacaaagcacgagtttttgccaccggaaccatttcttcgtttttcgcaacaaacaagcccaatccactactttaggtccaaaactcatgtttggggtggtttcgcgcaattttgttaccgcacgtcacccattccgaaaacgggtgtcgggtgcataaaagcacgagtttttgccaccggaaccatttcttcatttttcgcaacgaacatgcccaatcaactactttaggtccaaaactcatgtttggggtggtttcgcgcaatttcattgtcacacgtcacccattcagaaaacgtgtgtcgggtgcatacaaagcacgagtttttgccaccggaaccatttcttcatttttcgcaacgaacatgcccaatcaactactttaggtccaaaactcatgtttggggtggtttcaagcaatttcgttgtcgcacgtctcccattccaaaaacgggtatcggggtgcataaaagcacgagtttttgccaccggaaccatttcttcgtttttgcaacgaacatgcccaatccactactttaggtccaaaactcttgtttggggtgctttcgcacaatttcgttgtcgcacgtcacccattccaaaaaccgggtgtcgggtgcatacaaagcacgtgtttttgccaccggaatcatttcttcgtttttcgcaacgaacatgcccaatccactactttaggtccaaaactcttgtttgaggtggtttcgtacaatttcgttgccgcacgtcacccattgtgaaaacggttgtcaccccgcatacaaagcacgagattttgccaccggaaccatttcttcgtttttcgcaatgaacatgcccaatccactactttaggtccaaaactcatgtttggggtggtttcgcgcaatttcgttgtcgcacgtcacccattctgaacacggttgtcgggtgcatacaaagcacgagtttttgccaccggaaccatttcttcgtttttcgcaacgaacatgcccaatcagtaggtccaaaactcatgtttggggtggtttcgcgcaatttcgttgccgcacgtcacccattccgaaaacgggtgtcgggtgcataaaaacatgagtttttccaccggaaccatttctttgtttttcgcaactaacatgcccaatccactactttaggtccaaaactcgtgtttggggtggtttcgcgcaatttcgttaccgcacgtcacccattctgaaaacggttgtcgaggggtgcatacaaagcacgagtttttgtcatcgga

SEQ ID NO: 657 - DNA, 2490 bp, Zea mays
  source: /note="Zea mays BAC clone full insert sequence contig bacm.pk044.a19.fis6"
cagggttttggacctaaggagggggattgggcattttcgttgggaaaaaacgaagaaacggtttcggggggaaaacttgtggttttatgcacccgacacccgttttcggaatgggtgacgtgcgacaacgaaattgcgcgaaaccaccccaaacatgagttttggacctaaagtagtggattaggcatgtttgttgcgaaaaacgaagaaatggttccggtggcaaaaactcgtgctttgtatgcaccccgacaccagttttcggaatgggtgacatgcgacaacgtaattgcgagaaaccaccccaaacatgagttttggacctaaagtagtggattgggcatgttcgttgcgaaaaacgaagaaatggttctggtggcaaaaactcgtgcttttatgcacccgacacccattttcggaatgggtgacatgcgacaacgtaattgcgagaaaccaccccaaccatgagttttggacctaaagtagtggattggacatgttcgtttgcgaaaaacgaagaaatggttccggtggcaaaaactcgtgctttgtttgcacccgacaaccgttttcggaatgggtgacatgctacaacaaaattgtgagaaaccatcccaaacatgagttttggacctaaagtagtggattgggcatgttcgttgcgaaaaacgaagaaatggttccggtggcaaaaactcgtgctttgtatgcacccgacacccattttcggaatgggtgacgtgcgacaacgaaattgcgcgaaaccaacccaaacatgagttttggacctaaagtagtggattgggcatgttcgttgtgaaaaacaaagaaatggttccggtggcaaaaactcgtgctttgtatgcacccgacaaccgttttcagaatgggtgacgtgcgacaacgaaattgcgggaaaccaccccaaacatgagtttaggacctaaagtagtggattgggcatgttcgttgcgaaaaacgaagaaatggttccggtggcaaaaactcgtgctttgtatgcacccgacacccgttttcggaatgggtgacgtgcgacaacaaatttgcgagaaaccaccccaaatatgatttttggacctaaagtagtgaattgggcatgctcgttgcaaaaaacaaaaaaatggttccggtggcaaaaaccttgtgtttttacgccccccacaccctttttcgaaatgggtgacgtgggacaacgaaattgcgggaaaccaccccaaacctgggttttggacctaaagtagttgattgggcattttcgttgcgaaaaaagaagaaatggttccggtggcaaaaactcgtgctttgtatgcacccgacacccgttttcggaatgggtgacgtgcgacaacgaaattgcgcgaaaccaccccaaacatgagttttggacctaaagtagtggattgggcatgttcgttgtgaaaaacaaagaaatggttccggtggaaaaactcgtgctttgtatgcacccgacacccgttttcggaatgggtgacgtgcgacaatgaaattgcgagaaaccaccccaaacatgagttttggatctaagtagtggatggggcatgttcattgcaaaaaacaaagaaatggttccggtggcaaaaactcgtgctttgtatgcacccgacacccgttttcggaatgggtgacgtgcgacaacgaaattgcgcgaaaccaccccaaacatgagtttaggacctaaagtagtggaatgggcatgttcgttgcgaaaaacgaagaaatggttccggtggcaaaaactcgtgctttgtatgcacccgacacccgtttttggaatgggtgacgtgcggcaacgaaattgcgcgaaaccaccccaaacatgagttttggacctaaagtagtggattgggcatgttcgttgcgaaaaacgaagaaatggttccggtggcaaaaattcgtgctttgtatgcaccggacacccgttttcagaataggtgacgtgcgaacaacgaaattgcgagaaaccaaccaaaacatgagttttggacctaaagtagtggattgggcacgttcgttgcgaaaaacgaagaaatggttccggtggcaaaaactcgtgctttgtatgcacccgacaatcgttttcaaaatggatgacgtgcggcaacgaaattgcgtgaaaccaccccaaacatgagttttggacctaaagtagtggattgggcatgttcgttgcgaaaaacgaagaaatggttccggtggcaaaaactcgtgctttgtatgcacccgacaatcgttttcagaatgggtgacgtgcgacaacgaaattgcgcgaaaccaccccaaacatgagtttaggacctaaagtagtggattgggcatgttcgttgcgaaaaacgaagaaatggttccggtgccaaaaactcgtgctttgtatgcacccgacacccgtttttggaatgagtgacgtgcggcaacgaaattgcgcgaaaccaccccaaacatgagttttgg

SEQ ID NO: 658 - DNA, 3234 bp, Zea mays
  source: /note="Zea mays BAC clone full insert sequence contig bacm.pk044.a19.fis7"
ccacaggaaccatttcttcgtttttcgcaacgaacatgcccaatccactactttacgtccaaatctcatgtttggggtggtttcgcgcaatttcgttgtcgcacgtcacccattccgaaacgggtgtcgggtgcatacaaagcatgagtttttgccaccagaaccatttcttcgtttttcgcaacgaacatgcccaatccactactttaggtccaaaactcctgtttgaggtggtttcgcacaatttcgttgccgcacgtcacccattgtgaaaacggttgtcaccccgcatacaaagcacgagattttgccaccggaaccatttcttcgtttttcgcaacgaacatgcccaatccactactttaggtccaaatctcatgtttggggtggtttcgcgcaatttcgttgtcgcacgtcacccattctgaaaacggttgtcgggagcatacaaagcacgagtttttgccaccggaaccatttcttcgtttttcgcaacgaacatgcccaatccactacattaggtccaaaactcatgtttggggtggtttcacgcaatttcgttgccgcacgtcacccattccgaaaacgggtgtcgggtgcatacaaagcacgagtttttccaccggaaccatttctttgtttttcgcaacgaacatgcccaatccactactttaggtccaaaactcatgtttggggtggtttcgcgcaatttcgttgtcgcacgtcgcccattccgaaaacgggtgtcgggtgcatacaaagcacgagtttttgccaccggaaccatttctttgtttttcgcaatgaacatgccccatccactacttagatccaaaactcatgtttggggtggtttctcgcaatttcgttgtcgcacgtcacccattccgaaaacgggtgtcgggtgcatacaaagcacgagtttttccaccggaaccatttctttgtttttcgcaacgaacatgcccaatccactactttaggtccaaaactcatgtttggggtggtttcgcgcaatttcgttgtcgcacgtcgcccattccaaaaacgggtgtcgggtgcatacaaagcacgagtttttgccaccggaaccatttcttcatttttcgcaacgaacatgcccaatcaactactttaggtccaaaactcatgtttggggtggtttcgcgcaatttcgttgccgcacgtcacccattctgaaaacggttgtcggggtgcatacaaagcacgagtttttgccaccggaaccatttcttcgtttttcgcaacgaacatgcccaatccactactttaggtccaaaactcatgtttggggtggtttctcgcaatttcgttgccgcacgtcacccattccgaaaacgggtgtcgggtgcataaaagcacgagtttttgccatcggaaccatttccttgttttccgcaacgaacatgcccaatccactaatttaggtccaaaactcatgtttggggtagtttcgcgcaatttcgttgccgcacatcacccattccaaaaacgggtgtcgggtgcatacaaagcacgagtttttgccaccagaaccatttcttcatttttcgcaacgaacatgcccaatccactactttaggtcctaaactcatgtttggggtggtttcgcgcaatttcattgtcgcacgtcacccattctaaaaacggttgtcgggtgcatataaagcacgagtttttgccaccggaaccatttcttcgtttttcgcaacgaacaagcccaatccactacttcaggtccaaaactcatgtttggggtggtttcgcgcaatttcgttgccgcacgtcacccattccgaaaacgggtgtcgggtgcataaaagcacgagtttttgccaccggaaccatttcttcatttttcgcaacgaacatgcccaatcaactactttaggtccaaaactcatgtttggggtggtttcgcgcaatttcgttgccgcacgtcacccattctgaaaacggttgtcgtggtgcatacaaagcacgagtttttgccaccgaaaccatttcttcatttttcgcaatgaacatgcccaatccactactttaggtccaaaactcatgtttggggtggtttcgcgcaattttgttgtcgcacgtcacccattccgaaaacgggtgtcgggatgcataaaagcacgagttattgccaccagaaccatttcttcgtttttcacaacgaacatgcccaatccactactttaggtccaaaactcatgtttgggttggtttcgctcaatttcgttgtcacacgtcacccattccgaaaacaggtgtcgggtgcatacaaagcacgtgtttttgccaccggaaccatttcttcgtttttcgctacgcacatgcccaatccactactttaggtccaaaactcatgtttggggtggtttcgcgcaatttcgttgtcgcacgtcacccattttgaaaacgagtgtcgggtgcatacaaagcacgagtttttgccaccggaaccatttcttcgtttttcgcaacgaacgtgcccaatccactactttaggtccaaaactcatgtttgggttggtttctcgcaatttcgttgtcgcacgtcacccattctgaaaacgggtgtcgggtgcatacaaagcacgagtttttgccaccggaaccatttcttcgtttttcgcaacgaacatgcccaatccactactttaggtccaaaactcatgtttggggtggtttcgcgcaattttcgttgccgcacgtcacccattccaaaaacgggtgtcgggtgcatacaaagcatgagtttttgccaccagaaccatttcttcgtttttcgcaacgaacatgcccattccactactttaggtccaaaactcatgtgtggggtggtttcacgcaatttcgttgccgcacgtcacccattctgaaaacgggtgtcgggtgcataaaagcacgagtttttgccaccggaaccatttcttcgttttccacaacgaacatgcccaatccactactttaggtccaaaactcatgtttagggtggtttcgcgcaatttcgttgccgcacgtcacccaatccaaaaacggtgtcgggtgcatacaaagcacgagtttttgccaccaaaaccatttcttcgtttttcgcaacgaacatgcccaatccactaatttaggtctgaaactcatgtttggggtggtttcgcgcaatttcgttgacgcacgtcaaccattctgaaaagggttgtcgggtgcata

SEQ ID NO: 659 - DNA, 5553 bp, Zea mays
  source: /note="Zea mays BAC clone full insert sequence contig bacm.pk044.a19.fis8"
tgaggtcgacggtatctttacacaagacaagaaatggttccggtggcaaaaactcgtgctttgtatgcaccccgacaaccgttttcagaatgggtgacgtgcggcaacgaaattgcgcgaaaccaccccaaacatgagttttggacctaaagtagttgattgggcatgttcgttgcgaaaaatgaagaaatggttccggtggcaaaaactcgtgctttgtatgcacccgacacccgtttttggaatgggcgacgtgcgacaacgaaattgcgcgaaaccaccccaaacatgagttttggacctaaagtagtggattgggcatgttcgttgcgaaaaacgaagaaatggttccggtggcaaaaactcgtgctttgtatgcacccgacaacccttttcagaatggttgacgtgcgtcaacgaaattgcgcgaaaccaccccaaacatgagtttcagacctaaattagtggattgggcatgttcgttgcgaaaaacgaagaaatggttttggtggcaaaaactcgtgctttgtatgcacccgacaccgtttttggattgggtgacgtgcggcaacgaaattgcgcgaaaccaccctaaacatgagttttggacctaaagtagtggattgggcatgttcgttgtggaaaacgaagaaatggttccggtggcaaaaactcgtgcttttatgcacccgacaccccttttttgaatgggtgacgtgcggcaacgaaattgcgtgaaacccccccccaaatgagtttttgacctaaaatagtggattgggcatgttttttgtgaaaaaaaaagaaaaagttttgggggggaaaaaatcgtgcttcgtatgcaccccgacacccgttttcggaatgggtgacgtgcgacaacgaaattgcgagaaaccaccccaaatatgagttttggacctaaagtagtggattgggcatgttcgttgcgaaaaacgaagaaatggttacggtggcaaaaactcgtgcttttatgcacccgacacccgttttcggaatgggtgacgtgcggcaacgaaattgcgcgaaaccaccccaaacatgagttttggacctaaagtagtggattgggcatgttcgttgcgaaaaacgaagaaatggttctggtggcaaaaactcgtgctttgtatgcacccgacacccgttttcggaatgggtgacgtgcggcaacgaaattgcgcgaaaccaccccaaacatgagttttggacctaaagtagtggattgggcatgttcgttgcgaaaaacgaagaaatggttccggtggcaaaaactcgtgcttttatgcacccgacacccgttttcggaatgggtgacgtgcggcaacgaaattgcgtgaaaccaccccaaacatgagtttcagacctaaagtaatggattgggcatgttcgttgcgaaaaacgaagaaatggttccggtggcaaaaactcatgctttgtatgcacccgacacccgttttcggaatgggtgacgtgcgacaacgaaattgcgcgaaaccaccccaaacatgagatttcgacctaaagtagtggattgggcatgttcgttgcgaaaaacgaagaaatggttccgatggcaaaaactcgtgctttgtatgcatcccaacacccgttttcggaatgggtgacgtgcgacaacaaaattgcgcgaaaccaccccaaacatgagttttggacctaaagtagtggattgggcatgttcgttgcgaaaaacgaagaaatggttccggtggcaaaaactcgtgctttgtatgcaccacgacaaccgttttcagaatgggtgacgtgcgacaacgaaattgcgcgaaactaccccaaacatgagttttggacctaaagtagtggattgggcatgttcgttgcgaaaaacgaagaaatggttccggtggcaaaaactcgtgctttgtatgcacccgacacccgttttaggaatgggtgacgtgcgacaacgaaattgcgcgaaaccaccccaaacatgagttttggacctaaagtagtggattgggcatgttcgttgcgaaaaacgaagaaatggttccggtggcaaaaactcgtgctttgtatgcaccccgacaaccgttttcagaatgggtgacgtgcggcaacgaaattgcgcaaaaccaccccaaacatgagttttggacctaaagtagtggatagggcatgttcgttgcgaaaaaggaagaaatggttccggtggcaaaaagtcgtgctttgtatgcacccgacactcgttttcggaatgggtgacgtgcgacaacaaaattgcgcgaaaccaccccaaacatgagatttggacctaaagtagtggattgagcatgttcgttgcgaaaaacgaagaaatggttccggtggcaaaaactcgtgctttgtatgcatcccgacacccgtttcccgaatgggtgacgtgcggcaacgaaattgcgcgaaaccaccccaaacatgagttttggacctaaagtagtggattgggcatgttcgttgagaaaaacaaagaaatggttttggtggcaaaaactcgtgctttgtatgcatcccgacacccgtttttggaatgggtgacgtgggccaacgaaattgcgggaaaccaccccaaacatgagttttggacctaaagtagtggattgggcatgttcgttgcggaaaacgaagaaatggttccggtggcaaaaactcgtgctttgtatgcggggtgacaaccgttttcacaatgggtgacgtgcggcaacgaaattgcgagaaaccaccccaaacatgagttttggacctaaagtagtggattgggcatgttcgttgcgaaaaacgaagaaatggttccggtggcaaaaactcgtgctttgtatgcacccgacacccgttttcgaaatgggtgacgtgcgacaatgaaattgcgcgaaaccaccccaaacatgagttttggacctaaagtagttgattgggcatgttcgttgcgaaaaatgaagaaatggttccggtggcaaaaactcgtgctttgtatgcacccgacacccgttttcggaatgggcgacgtgcgacaacgaaattgcgcgaaaccaccccaaacatgagttttggacctaaagtagtggattgggcatgttcgttgtgaaaaaaaaaaaatggttccggtggaaaaactcgtgctttgtatgcacccgacacccgttttcggaatgggtgacgtgcggcaacgaaattgcgcgaaaccaccccaaacatgagttttggacctaaagtagtggattgggcatgttcgttgcgaaaaacaaagaaatggttccggtggcaaaatcttgtgcatttatgcacccgacacccgttttcggaatgggtgacgtgcggcaaccaaattgcgagaaaccacccccaacatgagttttggacctaaagtagtggattgggcatgttcgttgcgaaaaacaaaaaaatggttccggtggcaaaaaatggtgctttgtatgcacccgacaccccttttttgaataggtgacgtgcgacaacgaaattgcgagaaaccaaccaaaacatgagatttggacctaaagtagtggattgggcacgttcgttgcgaaaaacgaagaaatggttccggtggcaaaaactcgtgctttgtatgcggcccgacaatcgttttcaaaatggatgacgtgcgacaacgaaattgtgcgaaaccaccccaaacatgagttttggacctaaagtagtggattgggcatgtgcgtagcgaaaaacgaagaaatggttccggtggcaaaaactcatgctttgtatgcacccgacacctgttttcggaatgggtgacgtgtgacaacgaaattgagcgaaaccaacccaaacatgagatttggacctaaagtagtggattgggcatgttcgttgtgaaaaacgaagaaatggttctggtggcaataactcgtgcttttatgcacccgacacccgttttcggaatgtgtgacgtgcgacaacaaaattgcgcgaaaccaccccaaacatgagttttggacctaaagtagtggattgggcatgttcgttgcgaaaaatgaagaaatggttctggtggcaaaaactcgtgctttgtatgcacccgacacccgtttttggattgggtgacgtgcggcaaggaaattgcacgaaaccaccccaaacatgagttttggacctaaagtagtggattgggcatgttcgttgtggaaaacgaacaaatggttctggtggcaaaaactcgtgcttttatgcacccgacacccgttttcggaatgggtgacgtgcggcaacgaaattgcgagaaaccaccccaaacatgagtttcagacctaaagtagtggattgggcatgttcgttgcgaaaaacgaagaaatggttctggtggcaaaaactcatgctttgtatgcacacgacacccgttttcggaatgggtgacgtgcggcaacgaaattgcgtgaaaccaccccaaacatgagttttggacctaaagtagtggattgggcatgttcgttgcgaaaaacgaagaaatggttatggtggcaaaaactcatgctttgtatgcacccgacacccgttttcagaatgggtgacgtgcgacaacgaaattgcgcgaaaccaccccaaacatgagttttggacctaaagtagtggattgggcatgttcgttgcgaaaaacgaagaaatggttctggtggcaaaaactcgtgcttgtatgcacccgacacccgtttttggattgggtgacgtgcggcaacgaaattgcgcgaaaccaccccaaacatgagttttggacctaaagtagtggattgggcatgttcgttgcgaaaaacgaagaaatggttccggtggcaaaaactcgtgctttgtatgcacccgacaacccttttcagaatggttgacgtgcgtcaacgaaattgcgcgaaaccaccccaaacatgagtttcagacctaaattagtggattgggcatgttcgttgcgaaaaacgaagaaatggttttggtggcaaaaactcgtgctttgtatgcacccgacaccgtttttggattgggtgacgtgcggcaacgaaattgcgcgaaaccaccctaaacatgagttttggacctaaagtagtggattgggcatgttcgttgtggaaaacgaagaaatggttccggtggcaaaaactcgtgcttttatgcacccgacacccgttttcggaatgggtgacgtgcggcaacgaaattgcgtgaaaccaccccaaacatgagtttcagacctaaagtagtggattgggcatgttcgttgcgaaaaacgaagaaatggttctggtggcaaaaactcatgctttgtatgcacccgacacccgttttcggaatgggtgacgtgcgacaacgaaattgcgcgaaaccaccccaaacatgagatttcgacctaaagtagtggattgggcatgttcgttgcgaaaaacgaagaaatggttcctatggcaaaaactcgtgctttgtatgcatcccgacacccgttttcggaatgggtgacgtgcgacaacaaaattgcgcgaaaccacccca

SEQ ID NO: 660 - DNA, 4596 bp, Zea mays
  source: /note="Zea mays BAC clone full insert sequence contig bacm.pk044.a19.fis9"
tgaaggttcttcatccccacatgtgctaaacggcgatgccacaaccagcacatgttagtcttagcaattaagcatgcatctagaccggcctcctcttttgcaaaatcaactaaataaagtttgccgtctagtatacccttaaaagctaatgaaccatcacttcttctaaagacagacacatctacatttgtgaataaacagttatatcccatattacacagttggctcacagacaacaagttatatccaagcgactcaactaagaacacattagaaatagagtgctcggatgaaatagcaatttttcctaacccttttaccttgccttggttcccatcactgaatatgattgaatcttggggatccttgttcttgacataggaagagaacatcctcttttcccccgccatgtggttagtgcatccgctgttgataatccagcttgagccccggatgcataaacctgcgaggcaaatttaggcttgggtcttaggtacccaactcttgttgggtcctacaaggttagtacaaatagccttagggacccaaatgcaagttttatcttccttgcattttgcccctaattttctagcaactatcttcttatcctttctacaaatagcaaaggaagcatttaaagcatgatagattgtagaaggttcattacttgttttcctagttacatgagcatttctcctaggcacatgttgaatgacatttttcctggccaaacttcttgttgaatgacatttttcctggccaaacttctatcatacatcatagaagaacttgaagcaagcattgcatttgaatcataagcatgtgaaacaacatcattgcaacttctatcatggtgaacattcctagaatatttcctatcatggtataagaaagcatggttcttttgaatactatttgccataggggccttccctttctcgttgatggagatgggagccttatgacttgtcaagttcttggcttccctcttgaagccaagcccatccttaattgaggggtgtctaccaaccgtgtagacatcccttgcaaattttagtttatcaaaatcatttttgctagtcttaagttgggcattaagactagccacttcatcattcagtttagaaattgaaactaggtgttcactacaagcatcaacattaaaatctttacacctattgcaaactacaacatgttctacacaagatgttgatttattagctatttctaacttagcactcaaatcattatttatgctctttaagctagaaatagagtcatgacatgtagacaattcacaagaaagcatttcattccttgttatttctaaagcaagggatttttgtgcctctacaaacttatcatgttcttcatacaaaagatcctcttgcttttctaataacctatttttatcattcaaggcatcaattaattcattaatcttatcaaccttagttctatctaggcccttgaataaacatgaatagtctatttcatcatcgctagattcttcatcacttgaggaagcgtaagtactattatcacgagtgcttaccttcctttcccttgccatgaggcaggtgtgatgctcgtcggggaagagggccgacttgttgaaggcggtggtggtgagtccttcgttgtcggagtcggacgacgaacaatctgagtcccactcctttccaaggtgtgcctcgcccttagccttcttgtaagtcttcttcttttccctcttgttcccttgttcctggtcactatcattatcgggacaattagcgataaaatgaccaatcttaccacatttgaagcatgagcgcttccccttcgtcttggtcttgttgggatgctccttgcgaccccttagcgacgtcttgaaacgcttgatgatgagggccatttcttcatcattaagcccggccgcctcaacttgtgccaccttgcttggtagcgcctccttgctcctcgatgctttgagagcaatggtttgaggctcttggattgggccattcaacacatcatcaacgtatctggcctccttgatcatcatccgcccgcttacgaactttccaagtatctcctcgggcgtcatcttggtgtacctaggattctcacgaatattgttcacaagatgtggatcaaggacagtaaaagaccttagcattaggaggacaacgtcgtggtccttccatcgcgtgcttccatagctccttattttgttgactagggtgttgagccggttgtacgtttgggttggctcctcgcccctgatcattgcgaatctcccaagttcgccctccaccaactccatcttggtgagcatggtgacgtcgttcccctcatgagagattttgagggtgtcccaaatctgcttggcgttatccaagccacacaccttatggtattcatccctgtacaatgaagctagaagaacagtagtagcttgtgcatttttgtgaatttgctcattaatgaacatgggactatccgtactatcaaagtgcattccattttctactatctcccatatacttggatggagagagaacaagtggctacgcattttgtggctccaaaatccgtagtcctctccatcaaagtggggaggtttaccgtggggaatggaaagcaagtgagcattggaactttgcggaatacgagaataatcaaaggaaaagtttgaattaaccgtcttctttttctcgtagtcgttgtcgtcgtccttttgggaagaggaagattcgtcgctgtcgtagtagactatctccttgatgcgccttgtcttcttcttcctcccgtcttttcttttgtggcccgagcctgagttagtaggcttgtcatcctttggatcattgacgaaggactccttctccttatcattgaccaccatccccttgcccttaggatccatctcttcgggcgattagtccctttcttgaagagaacggttctgataccaattgagagcacctagagggggggtgaataggtgatcctgtaaaacttaaaacttaacaccacaaacttgattaagagttagaacaatgaaatcaagtgagtagagagaagagctcttgtgaagcacaatagacacaataaggacaagcacaagagacacgaggatttatcccgtggttcggccaagtacaaaacttgcctattccacgttgtggcgtcccaacggacgagagttgcactcaactcctctcaagtgatccaatgatcaacttgaataccacggtgttcttctttactttactctttcccgtttgcgaggaatctccacaacttggagtctctcgcccttacaataagaatcacaatgaagcacaagagtaagggatggaagcaacacactcaaatccacagcaaatacgcacacacaagagcaagacttgagctcaatacaatatctcgaggttctcactagaacagagctcaaatcactaagagtgtcgaacaagtgcgcaagaatgaagtgtgagtgatcaacaatgctcaaggaatgctttgtgtactcctccatgcgcctaggggtcccttttatagccccaaggcagctaggagccattgagagcatttcaagaaggcaattcttgccttctatcgtctggcgcaccggacagtccggtgcaccaccggacactgtccggtgcggatttctttccttctttggcgaagccaaccgttggcgctttggagccgttggcgcaccggacactgtccggtgcacagcggacagtccgatgccccttcagaccgttggctcttgccacgcgtcgcgtgcggattacgcggccgaccgttggcctagcctactgttggctcaccggacagtccggtgcaccaccggatagtccgatgatttatagccgcacgccaccgtcgaagtcccgagagcggctagttcgccagagccagcctggcgcaccagacactgtccggtgcaccaccggacagtccggtgtacccagactgagcagacttttggctgcttcgagccaagtttttccaattgatttttctctaattctagcacatagacaaacatgttagtacacaaaaaccaatgtattaagtctagaatcatacctttgtatttgatttgcactttgtccatcacttagcatagattatcataagtcccctcgtgttggcactcaatcaccaaaatacttaaaatggcccaagggcacatttccctttcagttttcggaatgggcgacgtgcgacaacaaaattgcgagaaaccaccccaaacatgagttttggacctaaagtagtggagtgggcatgttcgttgcgaaaaaacgaagaaatggttcaggtggcaaaaactcgtgcttttatgcacccgacacccgttttcggaatgggtgacgtgcggcaacgaaattgcgcgaaaccaccgcaaacatgagttttggacctaaagaagtggattgggcatgttcgttgcgaaaaacgaagaaacggtttcgggggaaaacttgtggttttatgcacccgacacctgttttcggaatgggtgacgtgcgacaacgaaattgcgcgaaaccaccccaaacatgagttttggacctaaagtatcaagggaaa

SEQ ID NO: 661 - DNA, 7057 bp, Zea mays
  source: /note="Zea mays BAC clone full insert sequence contig bacm.pk044.a19.fis10"
aatttcgttgccgcacgtcacccattccgaaaacgggtgtcgggtgcataaaagcacgagtttttgccaccgtaaccatttcttcgtttttcgcaacgaacatgcccaatccactactttaggtccaaaactcatgtttgggggtggtttcgctcaatttcgttgtcgcacgtcacccattccgaaaatgggtgtcgggtgcataaaagcacgagtttttgccaccagaaccatttattcgtttttcacaacgaacatgcccaatccattactttaggtccaaaactcatgtttgggttagtttcgcgcaatttcgttgtcgcacgtcacccattccgaaaacgggtgtcgggtgcatacaaagcacgagtttttgccaccggaaccgtttcttcgtttttcgcaacgcacatgcccaatccactactttaggtccaaaactcatgtttggggtggtttcgcgcaatttcgttgtcgcacgtcacccattctgaaaacggttgtcgggtgcatacaaagcacgagtttttgccaccggaaccatttcttcgtttttcgcaacgaacatgcccaatccactactttaggtccaaaactcatgtttgggttggttttgcgcaatttcgttgtcgcacgtcacccattccgaaaacgggtgtcgggtgcatacaaagcacgattttttgccactggaaccatttcttcgtttttcgcaacaaacatgcccaatccactactttaggtccaaaactcatgtttggggtggtttctcgcaatttcgttgccgcacgtcacccattccaaaaacgggtgtcgggtgcataaaaccacaagattttgccaccagaaccatttcttcctttttcgcaacgaacatgcccaatccactactttaggtccaaaactcatgtttggggtggtttcgctcaatttcgttgtcgcacgtcacccattccgaaaatgggtgtcgggtgcataaaagcacgagttattgccaccagaaccatttcttcgtttttcacaacgaacatgcccaatccactactttaggtccaaaactcatgtttgggttggtttcgctcaatttcgttgtcacacgtcacccattccgaaaacaggtgtcgggtgcatacaaagcacgtgtttttgccaccggaaccatttcttcgtttttcgctacgcacatgcccaatccactactttaggtccaaaactcatgtttggggtggtttcgcgcaatttcgttgtcgcacgtcacccattccgaaaacgggtgtcggggtgcatacaaagcacgagtttttgccaccggaaccatttcttcgtttttcgcaacaaacatgcccaatccactactttaggtccaaaactcatgtttggggtggtttcacgcaatttcgttgtcgcacgtcacccattccgaaaacgggtgtcgggtgcatacaaagcacaagtttttgccaccggaaccatttttttgtttttcgcaacgaacatgccctatccactactttaggtccaaaactcatgtttggggtggtttcgctcaatttctttgtcgcacgtcacccattctgaaaacggttgtcgggtgcatacaaagcacgagtttttgccaccggaaccatttcttcgtttttcgcaacgaacatgcccaatccattactttaggtccaaaactcatgttgggggtggtttcgcgcaatttcgttgtcgcacgtcacccattctgaaaacggttgtcgggtgcatacaaagcacgagtttttgccaccggaaccatttcttcgtttttcgcaacgaacatgcccaatccactactttaggtccaaaactcatgtttggggtggtttcgcgcaatttcgttgtcgcacgtcacccattcagaaaacgggtgtcgggtgcatacaaagcacgagtttttgccaccggaaccatttcttcatttttcgcaacgaacatgcccaatcaactactttaggtccaaaactcatgtttggggtggtttcgcgcaatttcgttgccgcacgtcacccattctgaaaacggttgtcgtggtgcatacaaagcacgagtttttgccaccgaaaccatttcttcgtttttcgcaatgaacatgcccaatccactactttaggtccaaaactcatgtttggggtggtttcgcgcaattttgttgtcgcacgtcacccattccgaaaacgggtgtcgggatgcatacaaagcacgagtttttgccataggaaccatttcttcgtttttcgcaacgaacatgcccaatccactactttaggtcgaaatctcatgtttggggtggtttcgcgcaatttcgttgtcgcacgtcacccattccgaaaacgggtgtcgggtgcatacaaagcatgagtttttgccaccagaaccatttcttcgtttttcgcaacgaacatgcccaatccactactttaggtctgaaactcatgtttggggtggtttcacgcaatttcgttgccgcacgtcatccattttgaaaacggttgtcgggtgcatacaaagcacgagtttttgccaccggaaccatttcttcgtttttcgcaacgaacgtgcccaatccactactttaggtccaaaactcatgttttggttggtttctcgcaatttcgttgtcgcacgtcacctattctgaaaacgggtgtccggtgcatacaaagcacgaatttttgccaccggaaccatttcttcgtttttcgcaacgaacatgcccaatccactactttaggtccaaaactcatgtttggggtggtttcgcgcaatttcgttgccgcacgtcacccattccaaaaacgggtgtcgggtgcatacaaagcacgagtttttgccaccggaaccatttcttcgtttttcgcaacgaacatgcccattccactactttaggtcctaaactcatgtttggggtggtttcacgcaatttcgttgtcgcacgtcacccattctgaaaacgggtgtcgggtgcataaaagcacgagtttttgccaccggaagcatttctttgtttttcgcaacgaacatgcccaatccactactttaggtccaaaactcatgtttggggtggtttcgctcaatttctttgtcgcacgtcactcattccgaaaatgggtgtcgggtgcataaaagcacgagtttttgccaccagaaccatttcttcgtttttcagaacaaacatgcccaatccactactttaggtccaaaactcatgtttggggtggtttcacgcaatttcgttgtcgcacgtcacccattccgaaaacgggtgtcgggtgcataaaaccacaagtttttgccaccggaaccatttctttgtttttcgcaacgaacatgcccaatccactactttaggtccaaaactcttatttgaggtggtttcgtacaatttcgttgccgcacgtcacccattgtgaaaacggttgtcaccccgcatacgaagcacgagattttgccaccggaaccatttcttcgtttttcgcaatgaacatgcccaatccactactttaggtccaaaactcatgtttggggtggtttcgcgcaatttcgttgtcgcacgtcacccattctgaacacggttgtcgggtgcatacaaagcacgagtttttgccaccggaaccatttcttcgtttttcgcaacgaacatgcccaatcagtaggtccaaaactcatgtttggggtggtttcgcgcaatttcgttgccgcacgtcacccattccgaaaacgggtgtcgggtgcataaaaacatgagttttttccaccggaaccatttctttgtttttcgcaatgaacatgctccatccactacttagatccaaaactcatgtttggggtggtttctcgcaatttcgttgtcgcacgtcacccattccgaaaacgggtgtcgggatgcatacaaagcacgagtttttccaccggaaccatttctttgtttttctcaacgaacatgcccaatccactactttaggtccaaaactcatgtttggggtggtttcgcgcaattttgttgtcgcacgtcacccattccgaaaacgggtgtcgggatgcatacaaagcacgagtttttgccaccggaaccatttcttcgtttttcacaacgaacatgctcaatccactactttaggtccaaatctcatgtttggggtggtttcgcgcaattttgttgtcgcacgtcacccattccgaaaacgggtgtcgggtgcatacaaagcacgagtttttgccaccggaaccatttcttcctttttcgcaacgaacatgccctatccactactttaggtccaaaactcatgtttggggtggttttgcgcaatttcgttgccgcacgtcacccattctgaaaacggttgtcggggtgcatacaaagcacgagtttttgccaccggaaccatttcttcgtttttcgcaacgaacatgcccaatccactatttaggtccaaaactcatgtttggggtggtttcgcgcaatttcgttgtcgcacgtcacccattcctaaaacgggtgtcgggtgcatacaaagcacgagtttttgccaccggaaccatttcttcgtttttcgcaacgaacatgcccaatccactactttaggtccaaaactcatgtttggggtagtttcgcgcaatttcgttgccgcacgtcacccattctgaaaacggttgtcgtggtgcatacaaagcacgagtttttgccaccggaaccatttcttcgtttttcgcaacgaacatgcccaatccactactttaggtccaaaactcatgtttggggtggtttcgcgcaattttgttgtcgcacgtcacccattccgaaaacgggtgtcggggtgcatacaaagcacgagttttttgccaccgaaaccatttcttcgtttttcgcaactaacatgcccaatccactactttaggtccaaaactcatgtttggggtggtttcacgcaatttcgttgtcgcacgtcacccattcaaaaaaggggtgtggggtgcataaaagcacgagtttttgccaccggaagcatttctttgtttttcgcaacgaacatgcccaatccactactttaggtccaaaactcatgtttggggtggtttcgctcaatttctttgtcgcacgtcactcattccgaaaatgggtgtcgggtgcataaaagcacgagtttttccaccggaaccatttctttgtttttcacaacgaacatgcccaatccactactttaggtccaaaactcatgtttggggtggtttcgcgcaatttcgttgtcgcacgtcgcccattccgaaaacgggtgtcgggtgcatacaaagcacgagtttttgccaccggaaccatttcttcatttttcgcaacgaacatgcccaatcaactactttaggtccaaaactcatgtttggggtggtttcgcgcaatttcgttgtcgcacgtcacccattccgaaaacgggtgtcgggtgcataaaagcacgagtttttgccaccagaaccatttcttcgtttttcagaacaaacatgcccaatccactactttaggtccaaaactcatgtttggggtggtttcacgcaatttcgttgtcgcacgtcacccattccgaaaacgggtgtcgggtgcataaaaccacaagtttttgccaccggaaccatttctttgtttttcgcaacgaacatgcccaatccactactttaggtccaaaactcatgtttggggtggtttcgctcaatttcgttgtcgcacgtcacccattccgaaaatgggtgtcgggtgcataaaagcacgagattttgccaccggaaccatttcttcgtttttcgcaacgaacatgcccaatacactactttaggtccaaaactcatgtttggggtggtttcgcgcaatttcgttgccgcacgtcacccattccgaaaacgggtgtcgggtgcatacaaagcacgagtttttgccaccggaaccatttcttcgtttttcgcaacgaacatgcccaatccactactttaggtcctaaactcatgtttggggtggtttcgcgcaatttcgttgtcgcacgtcacccattctgaaaacggttgtcgggtgcataaaaacacaagtttttgccaccagaaccatttcttcgtttttcgcaacgagcatgcccaatccactactttaggtccaaaactcatatttggggtggtttctcgcaaattcgttgtcgcacgtcacccattccgaaaacgggtgtcgggtgcatacaaagcacgagtttttgccaccggaaccatttcttcgtttttcgcaacgaacatgcccaatccactactttaggtcctaaactcatgtttggggtggtttcccgcaatttcgttgtcgcacgtcacccattctgaaaacggttgtcgggtgcatacaaagcacgagtttttgccaccggaaccatttctttgtttttcacaacgaacatgcccaatccactactttaggtccaaaactcatgtttgggttggtttcgcgcaatttcgttgtcgcacgtcacccattccgaaaatgggtgtcgggtgcatacaaagcacgagtttttgccaccggaaccatttcttcgtttttcgcaacgaacatgcccaatccactactttaggtccaaaactcatgtttgggatggtttctcacaattttgttgtagcatgtcacccattccgaaaacggttgtcgggtgcaaacaaagcacgagtttttgccaccggaaccatttcttcgtttttcgcaaacgaacatgcccaatccacttctttaggtccaaaactcatgtttgcggtggtttcgcgcaatttcgttgccgcacgtcacccattccgaaaacgggtgtcgggtgcataaaagcacgagtttttgccacctgaaccatttcttcgttttttcgcaacgaacatgcccactccactactttaggtccaaaactcatgtttggggtggtttctcgcaattttgttgtcgcacgtcgcccattccgaaaactgaaagggaaatgtgcccttgggccattttaagtattttggtgattgagtgccaacacga

SEQ ID NO: 662 - DNA, 10198 bp, Zea mays
  VARIATION (1307)..(1307): /replace="c" or "g" or "t"
  misc_feature (1307): /note="Nucleotide given in the sequence has no preference with respect to those in the annotation for said position"
  source: /note="Zea mays BAC clone full insert sequence contig bacm.pk044.a19.fis11"
tgggtgcccaccccaaacttgttttttgtattataggtagtgggggggggcctttttattgaaaaaagaaagaattggtttggggggaaaaaaatttttttttttttgcccccgcctcccttttttgaagggggggagtggggaaaaaaaatttgggggaaccccccccaaccttgggttttggacttaaggaggggggtggggctttttcgtgggaaaaaaaaaaaaaatgtttcggggggaaaaaattgttgttttttatccccccggccaccttttttgggatggggggacgggggaaaaggaattggggcgaaccccccccaaacttggttttgggccttaaggtgggggatggggcatgttcgttgaaaaaaacaaagaattggttcgggtgaaaaaactcgtgctttgtatgcatcccgacaccggttttgggaatgggtgacgtgcgacaacgaaattgcgagaaaccaccccaaacatgagttttggatctaagtagtggatggggcatgttcattgcgaaaaacaaagaaatggttccggtggaaaaaactcatgtttttatgcacccgacacccgttttcggaatgggtgacgtgcggcaacgaaattgcgcgaaaccaccccaaacatgagttttggacctactgattgggcatgttcgttgcgaaaaacgaagaaatggttccggtggcaaaaactcgtgctttgtatgcacccgacaaccgtgttcagaatgggtgacgtgcgacaacgaaattgcgcgaaaccaccccaaacatgagttttggacctaaagtagtggattgggcatgttcattgcgaaaaacgaagaaatggttccggtggcaaaatctcgtgctttgtatgcggggtgacaaccgttttcacaatgggtgacgtgcggcaacgaaattgtacgaaaccacctcaaacaagagttttggacgtaaagtagtggattgggcatgttcgttgcgaaaaacgaagaaatgattccggtggcaaaaacacgtgctttgtatgcacccgacacccgtttttggaatgggtgacgtgcgacaacgaaattgtgcgaaagcaccccaaacaagagttttggacctaaagtagtggattgggcatgttcgttgcaaaaacgaagaaatggttccggtggcaaaaactcgtgcttttatgcaccccgatacccgtttttggaatgggagacgtgcgacaacgaaattgcgcgaaaccacctcaaacatgagttttggacctaaagtagtggattgggcatgttcgttgcgaaaaacaaaaaaaagttccggtggcaaaacctcgtgcttatgcaccccgacacccgttttcggaatgggtgacgtgcgacaacaaaattgcgtgaaaccaccccaaacatgagttttggacctaaagtagtggattgggcatgttcgttgcgaaaacgaagaaatggttccgatggcaaaaactcgtgctttgtatgcaccccccgacaaccgttttcagaatgggtgacgtgcggtaacgaaattgcgcgaaaccaccccaaacatgagttttggacctaaagtagtggattgggcatgttagttgcgaaaaacgaagaaatggtttcggtggcaaaaaactcgtgctttgtatgcaccccgacacccgttttcggaatgggtgacgtgcgacaacaaaattgcgcgaaaccaccccaaacatgagttttggacctaaagtagtggattgggcatgttcgttgcgaaaaacgaagaaatgtttccggtgtcaaaaactcgtactttgtatgcaccacgacaaccgttttcagaatgggtgacgtgcgacaacgaaattgcgcgaaactaccccaaacatgagttttggacctaaagtagtggattgggcatgttcgttgcgaaaaacgaagaaatggttccggtggcaaaaactcgtgctttgtatgcacccgacacccgttttaggaatgggtgacgtgcgacaacgaaattgcgcgaaaccaccccaaacatgagttctggacctaaagtagtggattgggcaggttcattgcgaaaaaaaaaaaaatggttccggtggcaaaaaatcgtgctttgtatgccccccgaccacccttttttaaaatgggtgacgtgggacaaaaaaattgcgcaaaacccccccaaacaggagttttggacctaaaataggggattgggcatgtttgttgcaaaaaaagaaaaaatggttccggtggcaaaaactcgtgctttgtatgcacccgacacccgttttaggaatgggtgacgtgcgacaacgaaattgcgcgaaaccaccccaaacatgagttttggacctaaagtagtggattgggcatgttcgttgcgaaaaacgaagaaatggttccggtggcaaaaacttgtggttttatgcaccccgacacccgttttcggaatgggtgacgtgcgacaacgaaattgcgtgaaaccaccccaaacatgagttttggacctaaagtagtggatagggcatgtttgttgcgaaaaacgaagaaatggttccggtggcaaaaaactcgtgcttcgtatgcaccccgacacccgttttcggaatgggtgacgtgcgacaacgaaattgctagaaaccaccccaaatatgagttttggatctaaagtagtggattgggcatgttcgttgcgaaaaacgaagaaatggttacggtggcaaaaactcgtgcttttatgcacccgacacccgttttcggaatgggtgacgtgcggcaacgaaattgcgcgaaaccaccccaaacatgagttttggaccttaagtagtggattgggcatgttcgttgcgaaaaacgaagaaatggttctggtggcaaaaactcgtgctttgtatgcacccgacacccgttttcggaatgggtgacgtgcggcaacgaaattgcgcgaaaccaccccaaacatgagttttggacctaaagtagtggattgggcatgttcgttgcgaaaaacaaagaaatggttctggtggcaaaatcttgtgcttttatgcacccgacacccgttttcggaatgggtgacgtgcggcaatgaaattgcgagaaaccaccccaaacatgagttttggacctaaagtagtggattgggcatgttcgttgcgaaaaacgaagaaatggttccagtggcaaaaactcgtgggttgtatgcacccgacacccgttttcggaatgggtgacgtgcgacaacgaaattgcgcgaaaccaacccaaacatgagttttggacctaaagtagtggattgggcatgttcgttgtgaaaaacgaagaaatggttccggtggcaaaatcttgtgcttttatgcaccggacacccgttttcggaatgggtgacgtgcggcaacgaaattgcgagaaatcaccccaaacatgagttttggacctaaagtagtggattgggcatgttcgttgcgaaaaacgaagaaatggttccggtggcaaaaactcgagcttttatgcacgcgacacccgttttcggaatgggtgacgtgcgacaacgaaattgcgtgaaaccaccccaaacatgagtttaggacctaaagtagtggaatgggcacgttcgttgcggaaaacgaagaaatggttccggtggcaaaaactcgtgcttttatgcacccgacactcgttttcggaatgggtgacgtgcggcaacgaaattgcgtgaaaccaccccaaacatgaattttggaccaaaagtagtggattgggcatgttctttgcgaaaaacgaagaaatggttccggtggcaaaaactcgtgctttgtatgcacccgacaacccttttcagaatgggtgacgtgcgacaacgaaattgcgcgaaaccaccccaaacatgagttttggacctaaagtagtggattgggcatgttcgttgcgaaaaatgaagaaatggttctggtggcaaaaactcgtgctttgtatgcaccccacacccctttttggaatgggtgacgtgcggcaaggaaattgcgcgaaaccaccccaaacatgagttttggacctaaagtagtggattgggcatgttcgttgtgaaaaacaaagaaatggttccggtggcaaaaactcgtgcttttatgcacccgacacccgttttttgaatgggtgacgtgcgacaacgaaattgcgggaaaccaccccaaacatgagtttaggacctaaagtagtggattgggcatgttcgttgcgaaaaacgaagaaatggttccggtggcaaaaactcgtgctttgtatgcacccgacacccgttttcggaatgggtgacgtgcgacaacgaatttgcgagaaaccaccccaaatatgagttttggacctaaagtagtggattgggcatgctcgttgcgaaaaacgaagaaatggttctggtggcaaaaacttgtgtttttatgcacccgacaaccgttttcagaatgggtgacgtgcgacaacgaaattgcgcgaaaccaccccaaacatgagtttaggacctaaagtagtggattgggcatgtttgttctgaaaaacgaagaaatggttctggtggcaaaaactcgtgcttttatgcacccgacacccattttcggaatgggtgacgtgcgacaacgaaattgagcgaaaccaccccaaacatgagttttgtacctaaagtagtggattgagcatgttcattgcgaaaaacgaagaaatggttccggtggcaaaaacttgtggttttatgcacccgacacccgttttcggaatgggtgacgtgcgacaacgaaattgcgtgaaaccaccccaaacatgagtttaggacctaaagtagtggattgggcatgttcgttgcgaaaaacgaagaaatggtaccggtggcaaaaactcgtgctttgtatgcacccaacacccgtttttggaatgggtgacgtgcggcaacgaaattgcgcgaaaccaccccaaacatgagttttggacctaaagtagtgtattgggcatgttcgttgcgaaaaacgaagaaatggttccggtggcaaaaactcgtgctttgtatgcacccgacacccgttttcggaatgggtgacgtgcggcaacgaaattgcgcgaaaccaccccaaacatgaattttggacctaaagtagtggattgggcatgttcgttgcgaaaaacgaagaaatggttccggtggcaaaatctcgtgcttttatgcacccgacacccattttcggaatgggtgacgtgcgacaacgaaattgagcgaaaccacccaccccaaacatgagttttggacctaaagtagtggattgggcatgttcgttgtgaaaaacgaagaaatggttccggtggcaaaaactcgtgctttatatgcacccgacacccgttttcggaatgggtgacgtgcggcaacgaaattgcgcgaaaccaccccaaacataagttttggacctaaagtagtggattgggcatgttcgttgtgaaaaacgaagaaatggttctggtatcaaaatctcgtgcttttatgcacccgacacccgttttcggaatgggtgacgtgcggcaatgaaattgcgagaaaccaccccaaacatgagttttggacctaaagtagtggattgggcatgttcgttgcgaaaaacgaagaaatggttccggtggcaaaaactcgtgctttgtatgcacccgacacccattttcggaatgggtgacgtgcgacaacgaaattgcgcgaaaccaacccaaacatgagttttggacctaaagtagtggattgggcatgttcgttgtgaaaaacaaagaaatggttccggtggcaaaaactcgtgctttgtatgcacccgacaaccgttttcagaatgggtgacgtgcgacaacgaaattgcgggaaaccaccccaaacatgagtttaggacctaaagtagtggattgggcatgttcgttgcgaaaaacgaagaattgcttccggtggcaaaaactcgtgctttgtatgcacccgacacccgttttcggaatgggtgacgtgcgacaacgcaattgtgagaaaccaccccaaacatgagttttggacctaaagtagtggattgggcatgttcgttgcgaaaaacgaagaaatggttctggtggcaaaatcttgtgcttttatgcacccgacacccgttttcggaatgggtgacgtgcggcaacgaaattgcgagaaaccaccccaaacatgagttttggacctaaagtagtggattgggcatgttcgttgcgaaaaacgaagaaatggttccggtggcaaaaactcatgcgttgtatgcacccgacacccgttttcggaatgggtgacgtgcgacaacgaaattgcgcgaaaccaacccaaacatgagttttggacctaaagtagtggattgggcatgttcgttgcgaaaaacgaagaaatggttctggtggcaaaattttgtgcttttatgcaccggacacccgttttcggaatgggtgacgtgcggcaacgaaattgcgagaaaccaccccaaacatgagttttggacctaaagtagtggattgggcatgttcgttgcgaaaaacgaagaaatggttccggtggcaaaaactcctgcgttgtatgcacccgacacccgttttcggaatgggtgacgtgcgacaacgaaattgcgtgaaaccaccccaaacatgagttttggacctaaagtaatggattgggcatgttcgttgcgaaaaacgaagaaatggttccggtggcaaaaactcgtgctttttatgcaccggacaccctttttgggaatgggtgacgtgcgacaaggaaattgggggaaaccaccccaaacatgaattttggacttaaagtagcggattgggcatgttcgttgtgaaaaacgaagaaatggttccggtggcaaaaacttgtggttttatgcacccgacacccgttttcggaatgggtgacgtgcgacaacgaaattgcgcgaaaccaccccaaacatgagttttggacctaaagtagtggattgggcttgttcgttgcgaaaaactaggaaatggttccggtggcaaaaactcgtgcttttatgcacccaacacccgttttcggaatgggtgacgtgcggcaacgaaattgcgagaaaccaccccaaacatgagttttggacctaaagtagtggattgggcatgttcgttgtgaaaaacgaagaaatggttccggtggcaaaaactcgtgctttgtatgcccccgaaacccgttttcagaaagggtgacgtgcgacaacgaaattgcgcgaaaccaccccaaacatgagttttggacctaaagtagtggattgggcatgttcgttgcggaaaacgaagaaatggttccggtggcaaaaactcgtgctttgtatgcggggtgacaaccgttttcacaatgggtgacgtgcggcaacgaaattgcgagaaaccaccccaaacatgagttttggacctaaagtagtggattgggcatgttcgttgcgaaaaacgaagaaatggttccggtggcaaaaactcgtgctttgtatgcacccgacacccgttttcgaaatgggtgacgtgcgacaatgaaattgcgcgaaaccaccccaaacatgagttttggacctaaagtagttgattgggcatgttcgttgccaaaaacgaagaaatggttccggtggcaaaaactcgtgctttgtatgcacccaaccccctttttcggaatgggcgacgtgcgacaacaaaattgcgagaaaccaccccaaacatgagttttggacctaaagtagtggagtgggcatgttcgttgcgaaaaaacgaagaaatggttcaggtggcaaaaactcgtgcttttatgcacccgacacccgttttcggaatgggtgacgtgcggcaacgaaattgcgcgaaaccaccgcaaacatgagttttggacctaaagtagtggattgggcatgttcgttgcgaaaaacgaagaaatggttccggtggcaaaaactcgtgctttgtatgcacccgacacccattttcggaatgggtgacgtgcgacaacgaaattgcgcgaaaccaacccaaacatgagttttggacctaaagtagtggattgggcatgttcgttgtgaaaaacaaagaaatggttccggtggcaaaaactcgtgctttgtatgcacccgacaaccgttttcagaatgggtgacgtgcgacaacgaaattgcgggaaaccaccccaaacatgagtttaggacctaaagtagtggattgggcatgttcgttgcgaaaaacgaaaaaatggttccggtggcaaaaactcgtgctttgtatgcacccgacacccgttttcggaatgggtgacgtgcgacaacaaatttgcgagaaaccaccccaaatatgagttttggacctaaagtattggattgggcatgttcgttgcgaaaaacgaagaaatggttctggtggcaaaaacttgtgtttttatgcacccgacaaccgtgttcagaaagggtgacgtgcgacaacgaaattgcgcgaaaccaccccaaacatgagttttggacctaaagtagtggattgggcatgttcattgcgaaaaacgaagaaatggttccggtggcaaaatctcgtgcttcgtatgcggggtgacaaccgttttcacaatgggtgacgtgcggcaacgaaattgtacgaaaccacctcaaataagagttttggacctaaagtagtggattgggcatgttcgttgcgaaaaacgaagaaatgattccggtggcaaaaacacgtgctttgtatgcacccgacacccgtttttggaatgggtgacgtgcgacaacgaaattgtgcgaaagcaccccaaacaagagttttggacctaaagtagtggattgggcatgttcgttgcaaaaacgaagaaatggttccggtggcaaaaactcgtgcttttatgcaccccgatacccgtttttggaatgggagacgtgcgacaacgaaattgcgcgaaaccacctcaaacatgagttttggacctaaagtagtggattgggcatgttcgttgcgaaaaacgaagaaatggttccggtgacaaaacctcgtgcttatgcaccccgacacccgttttcggaatgggtgacgtgcgacaacaaaattgcgtgaaaccaccccaaacatgagttttggacctaaagtagtggattggacatgtttgttgcgaaaacgaagaaatggttccgatggcaaaaactcgtgctttgtatgcacccctcgacaaccgttttcagaatgggtgacgtgcggtaacgaaattgcgcgaaaccaccccaaacatgagttttggacctaaagtagtggattgggcatgttagttgcgaaaaacaaagaaatggtttcggtggcaaaaaactcgtgctttgtatgcacccgacacccgttttcggaatgggtgacgtgcgacaacaaaattacgcgaaaccaccccaaacatgagatttggacctaaagtagtggattgagcatgttcgttgcgaaaaacgaagaaatggttccggtggcaaaaactcgtgctttgtatgcatcccgacacccgttttcggaatgggtgacgtgcgacaacgaaattgcgcgaaaccaccccaaacatgagttttggacctaaagtagtggattgggcatgttcgttgagacaaacaaagaaatggttccggtggaaaaactcgtgctttgtatgcatcccgacacccgttttcggaatgggtgacgtgcgacaacgaaattgcgagaaaccaccccaaacatgagttttggatctaagtagtggatggggcatgttcattgcgaaaaacaaagaaatggttccggtggaaaaaactcatgtttttatgcacccgacacccgttttcggaatgggtgacgtgcgacaacgaaattgcgcgaaaccaccccaaacatgagttttggacctaatgtagtggattgggcatgttcgttgcgaaaaatgaagaaatggttccggtggcaaaaactcgtgctttgtatgcacccgacaaccgttttcggaatgggtgacgtgcgacaacgaaattgcgcgaaaccaccccaaacatgagttttggacctaaagtagtggattgggcatgttcgttgcgaaaaaggaagaaatggttccggtggcaaaatctcgtgctttgtatgcggggtgacaaccgttttcataatggg

SEQ ID NO: 663 - DNA, 8612 bp, Zea mays
  source: /note="Zea mays BAC clone full insert sequence contig bacm.pk044.a19.fis12"
gatcacagtgcacaagagctaaaaaatgagtgagcaagagtggttggccagaaagcgtgcaaaataagtttgcggtatggccgtatttatacgcttgatgcgttgaaagttgaaagaccccacttgtcattgaatgttgctattctagcaaagggaaggtgttttttcggaccttcggcataaagccttcgttcatatcgcaatctgaatttattatttcaaacaaattaatattgcgaggggctactgttggggaccttcggcgtccgaaggtcctcaaaaacatgatttaatagtgtttctggtgtataatgtgcaaacaggtatcttcggactcgaatcggtatcacagagggagaagctcaaagcatacgaaggttgatacagcaccgaagctgtgagcagaaaagcttcggcatggtggcaggaaaggaaaccgacttaaagatgaaaaggctattcggacctcgatggattactatagagttattgtcagatgtaaagggcataaatgtaattttgtaagggctgtgtcccgtgtctataaataggtgaacagtatccccgtactgttcacgctgacttggcatttgcttttgcgtcacgcttgtactttttaccttctctcaggaccgaaggtacatttgtaatttgaaatcatttctatttttccatgttaataaaatagaaatgattctatgatgatgcttatattatatttcatgctttatatgaatccttcgtcattacttgttatgtttacgaaggtatgtctcttatgaccttcgtccgaaactcattatttcccgaagggacataatgcttcgaaggacgaaggactttaacacttaacactttttatgttgccttgttcttaactcttagcatttgagaacaagtccccaacagtcacccattcctaaaacgggtgtcgggtgcatacaaagcacgagtttttgccaccggaaccatttcttcgtttttcgcaacgaacatgcccaatccactactttaggtccaaaactcatgtttggggtagtttcgcgcaatttcgttgtcgcacgtcacccattctgaaaacggttgtcgtggtgcatacaaagcacgagtttttgccaccggaaccatttcttcgtttttcgcaacgaacatgcccaatccactactttaggtccaaaactcatgtttggggtggtttcgcgcaattttgttgtcgcacgtcacccattccgaaaacgggtgtcggggtgcatacaaagcacgagttttttgccaccgaaaccatttcttcgtttttcgcaactaacatgcccaatccactactttaggtccaaaactcatgtttggggtggtttcgcgcaatttcgttaccgcacgtcacccattctgaaaacggttgtcgaggggtgcatacaaagcacgagtttttgccatcagaaccatttcttcgttttcgcaacgaacatgcccaatccactactttaggtccaaaactcatgtttggggtggtttcacgcaattttgttgtcgcacgtcacccattccgaaaacgggtgtcggggtgcataagcacgaggttttgtcaccggaaccatttcttcgtttttcgcaacgaacatgcccaatccactactttaggtccaaaactcatgtttgaggtggtttcgcgcaatttcgttgtcgcacgtctcccattccaaaaacgggtatcggggtgcataaaagcacgagtttttgccaccggaaccatttcttcgtttttgcaacgaacatgcccaatccactactttatgtccaaaactcttgtttggggtgctttcgcacaatttcgttgtcgcacgtcacccattccaaaaaagggtgtcgggtgcatacaaagcacgtgtttttgccaccggaaccatttcttcgtttttcgcaacgaacatgcccaatccacaactttaggtccaaaactcttgtttgaggtggtttcgcacaatttcgttgccgcacgtcacccattatgaaaacggttgtcaccccgcatacaaagcatgagtttttgccaccggaaccatttcttcctttttcgcaacgaacatgcccaatccactactttaggtccaaaactcatgtttggggtggtttcgcgcaatttcgttgtcgcacgtcacccattctgaaaacggttgtcgggtgcatacaaagcacgagattttgccaccggaaccatttcttcatttttcgcaacgaacatgcccaatccactactttaggtccaaatctcatgtttggggtggtttcgcgcaatttcgttgtcgcacgtcacccattctgaaaacggttgtcgggagcatacaaagcacgagtttttgccaccggaaccatttcttcgtttttcgcaacgaacatgcccaatccactacattaggtccaaaactcatgtttggggtggtttcacgcaatttcgttgccgcacgtcacccattccgaaaacgggtgtcgggtgcatacaaagcacgagtttttccaccggaaccatttctttgtttttcgcaacgaacatgcccaatccactactttaggtccaaaactcatgtttggggtggtttcacgcaattttgttgtcgcacgtcgcccattccgaaaacgggtgtcggggtgcataagcacgagtttttgtcaccggaaccatttcttcgtttttcgcaacgaacatgcccaatccactactttaggtccataagtcatgtttgaggtggtttcgcgcaatttcgttgtcgcacgtcacccattccaaaaacgggtatcggggtgcataaaagcaggagtttttgccaccggaaccatttcttcgtttttgcaacgaacatgcccagtccactactttaggtccaaaactcttgtttggggtgctttcgcacaatttcgttgtcgcacgtcacccattccaaaaacgggtgtcgggtgcatacaaagcacgtgtttttgccaccggaatcatttcttcgtttttcgcaacgaacatgcccaatccactactttaggtccaaaactcttgtttgaggtggtttcgtacaattttgttgccgcacgtcacccattgtgaaaacggttgtcacccctcatacaaagcacgagattttgccaccggaaccatttcttcgtttttcgcaatgaacatgcccaatccactactttaggtccaaaactcatgtttggggtggtttcgcgcaatttcgttgtcgcacgtcacccattctgaacacggttatcgggtgcatacaaagcacgagtttttgccaccggaaccatttcttcgtttttcgcaacgaacatgcccaatcagtaggtccaaaactcatgtttggggtggtttcgcgcaatttcgttgccgcacgtcacccattccgaaaacgggtgtcgggtgcataaaaacatgagttttttccaccggaaccatttctttgtttttcgcaatgaacatgccccatccactacttagatccaaaactcatgtttggggtggtttctcgcaatttcgttgtcgcacatcacccattccgaaaacgggtgtcgggatgcatacaaagcacgagttttcccaccggaaccatatctttgtttttctcaacgaacatgcccaatccactactttaggtccaaaactcatgtttggggtggtttcgcgcaatttcgttgtcgcacgtcacccattccgaaaacgggtgtcgggatgcatacaaagcacgagtttttgccaccggaaccatttcttcgtttttcgcaacgaacatgctcaatccactactttaggtccaaatctcatgtttggggtggtttcgcgcaattttgttgtcgcacgtcacccattccgaaaacgggtgtcgggtgcatacaaagcacgagtttttgccaccggaaccatttcttcctttttcgcaactaacatgccctatccactactttaggtccaaaattcatgtttggggtggttttgcgcaatttcgttaccgcacgtcacccattctgaaaacggttgtcgaggggtgcatacaaagcacgagtttttgccaccggaaccatttcttcgtttttcgcaatgaacatgcccaatccactactttaggtccaaaactcatgtttggggtggtttcgcgcaattttgttgtcgcacgtcacccattccgaaaacgggtgtcgggtgcatacaaagcacgagtttttgccaccggaaccatttcttcgtttttcgcaacgaacatgcccaatccactactttaggtccaaaactcatgtttggggtagtttcgcgcaatttcgttgtcgcacgtcacccattctgaaaacggttgtcgtggtgcataaaaagcacgagtttttgcccccggaaccatttttttgtttttggcaaggaacatgcccaatccactactttaggtccaaaactcatgtttggggtggtttcgcgcaattttgttgtcgcacgtcacccattccgaaaacgggtgtcggggtgcatacaaagcacgagttttttgccaccgaaaccatttcttcgtttttcgcaactaacatgcccaatccactactttaggtccaaaactcatgtttggggtggtttcgcgcaatttcgttaccgcacgtcacccattctgaaaacggttgtcgaggggtgcatacaaagcacgagtttttgccatcggaaccatttcttcgttttcgcaacaaacatgcccaatccactactttaggtccaaaactcatgtttggggtggtttcacgcaattttgttgtcgcacgtcacccattccgaaaacgggtgtcgggtgcataagcacgaggttttgtcaccggaaccatttcttcgtttttcgcaacgaacatgcccaatccactactttaggtccaaaactcatgtttgaggtggtttcgcgcaatttcgttgtcgcacgtctcccattccaaaaacgggtatcagggtgcataaaagcacgagtttttgccaccggaaccatttcttcgtttttgcaacgaacatgcccaatccactactttaggtccaaaactcttgtttggggtgctttcgcacaatttcgttgtcgcacgtcacccattccaaaaaccgggtgtcgggtgcatacaaagcacatgtttttgccaccggaatcatttcttcgtttttcgcaacgaacatgcccaatccactactttaggtccaaaactcttgtttgaggtggtttcgtacaatttctttgccgcacgtcacccattgtgaaaacggttgtcaccccgcatacaaagcacgagattttgccaccggaaccatttcttcgtttttcgcaatgaacatgcccaatccactactttaggtccaaaactcatgtttggggtggtttcgcgcaatttcgttgtcgcacgtcacccattctgaacacggttgtcgggtgcatacaaagcacgagtttttgccaccggaaccatttcttcgtttttcgcaacgaacatgcccaatcagtaggtccaaaactcatgtttggggtggtttcgcgcaatttcgttgccccacgtcacccattccgaaaacgggtgtggggtgcataaaaacatgagttttttccaccggaaccatttctttgtttttcgcaatgaacatgccccatccactacttagatccaaaactcatgtttggggtggtttctcgcaatttcgttgtcgcacgtcacccattccgaaaacgggtgtcgggatgcatacaaagcacgagtttttgcccccagaaccatttctttgtttttctcaacgaacatgcccaatccactactttaggtccaaaactcatgtttggggtggtttcgcgcaatttcgttgtcgcacgtcacccattccgaaaacgggtgtcgggatgcatacaaagcacgagtttttgccaccggaaccatttcttcgtttttcgcaacgaacatgctcaatccactactttaggtccaaatctcatgtttggggtggtttcgcgtaattttgttgtcgcacgtcacccattccgaaaacgggtgtcgggtgcatacaaagcacgagttttttgccaccgaaaccatttctttgtttttcgcaactaacatgcccaatccactactttaggtccaaaactcgtgtttggggtggtttcgcgcaatttcgttaccgcacgtcacccattctgaaaacggttgtcgaggggtgcatacaaagcacgagtttttgtcatcggaaccatttcttcgttttcgcaacaaacatgtccaatccactactttaggtccaaaactcatgtttggggtggtttcacgcaattttgttgtcgcacgtcacccattccgaaaacgggtgtcggggtgcataagcacgaggttttgccaccggaaccttttcttcgtttttcgcaacgaacatgcccaatccactactttaggtccaaaactcatgtttgaggtggtttcgcgcaatttcgttgtcgcacgtctcccattccaaaaacgggtatcggggtgcataaaagcacgagtttttgccaccggaaccatttcttcgtttttgcaacgaacatgcccaatccactactttaggtccaaaactcttgtttggggtgctttcgcacaatttcgttgtcgcacgtcacccattccaaaaacgggtgtcgggtgcatacaaagcacgtgtttttgccaccggaatcatttcttcgtttttcgcaacgaacatgcccaatccactactttaggtccaaaactcttgtttgaggtggtttcgtacaatttcgttgccgcacgtcacccattgtgaaaacggttgtcaccccgcatacaaagcacgagattttgccaccggaaccatttcttcgtttttcgcaatgaacatgcccaatccactactttaggtccaaaactcatgtttggggtggtttcgcgcaatttcgttgtcgcacgtcacccattctgaacacggttgtcgggtgcatacaaagcacgagtttttgccaccggaaccatttcttcgtttttcgcaaagaacatgcccaatccactacttttggtccaaaattcatgtttggggtggtttcacgcaatttcgttgtcgcacgtcacctattccgaaaacgggtgtccggtgcatacaaagcacgaatttttgccaccggaaccatttcttcgtttttcgcaacgaacatgcccaatccactactttaggtccaaaactcatatttggggtggtttcccgcaatttcattgtcgcacgtcacccattccgaaaacgggtgtcgggtgcatacaaagcacgagtttttgccaccggaaccatttcttcgtttttcgcaacaaacatgcccattccactactttaggtccaaaactcatgtttggggtggtttcacgcaatttcgttgccgcacgtcacccattccgaaaacgggtgtcgggtgcataaaaccacaagtttttgccaccggaaccatttcttcgtttttcacaacgaacatgcccaatccgctactttaggtccaaaactcatgtttggggtggtttcgctcaatttctttgtcgcacgtcactcattccgaaaatgggtgtcgggtgcataaaagcacgagtttttgccaccggaaccatttcttcgtttttcacaacgaacatgcccaatccactactttaggtccaaaactcatgtttgggttggtttcgcgcaatttcgttgtcgcacgtcacccattccgaaaacgggtgtcgggtgcatacaacgcacgagtttttgccaccggaaccatttcttcgtttttcgcaacgaacatgcccaatccactactttaggtccaaaactcatgtttggggtggtttctcgcaatttcgttgccgcacgtcacccattccgaaaacgggtgtcgggtgcataaaagcacaagattttgccaccagaaccatttcttcgtttttcgcaacgaacatgcccaatccactactttaggtccaaaactcatgtttggggtggtttcgcgcaatttcgttgccgcacgtcacccattccgaaaacgggtgtcgggtgcatacaaagcacgagtttttgccaccagaaccatttcttcgtttttcgcaacgaacatgcccaatccacaactttaggtccaaaactcttgtttgaggtggtttcgcacaatttcgttgccgcacgtcacccattatgaaaacggttgtcaccccgcatacaaagcacgagattttgccaccggaaccatttcttcctttttcgcaacgaacatgcccaatccactactttaggtccaaaactcatgtttggggtggtttcgcgcaatttcgttgtcgcacgtcacccattctgaaaacggttgtcgggtgcatacaaagcacgagtttttgccaccggaaccatttcttcatttttcgcaacgaacatgcccaatccactacattaggtccaaaactcatgtttggggtggtttcgcgcaatttcgttgtcgcacgtcacccattccgaaaacgggtgtcgggtgcataaaaacatgagttttttccaccggaaccatttctttgtttttcgcaatgaacatgccccatccactacttagatccaaaactca

SEQ ID NO: 664 - DNA, 839 bp, Zea mays
  VARIATION (13)..(101): /replace="c" or "g" or "t"
  misc_feature (13)..(101): /note="Nucleotides given in the sequence have no preference with respect to those in the annotations for said positions"
  source: /note="Zea mays BAC clone full insert sequence contig bacb.pk155.h15.fis1"
gccatgcgcattaaaaaaaaaaaaaaaaaaaaaaaaaaaaaaaaaaaaaaaaaaaaaaaaaaaaaaaaaaaaaaaaaaaaaaaaaaaaaaaaaaaaaaaaagttgctcctcctgctgagaaaaatttcaaaaaaatcatacaaaaaagaaaaacaaaatcacctgtgattcctactagtgcctttttagcctcgatagtacaatatttactgtactgccattctgctagttccatccgtacttcgacttgtggccagcaatatagtttcgtgttttgcactataattcaactttacattattgtttgatcgtgctaattcttgacttgagtgcagcctacccaaaactccacatatttctacgacgagaaggtttctgtttctccaggcaatcgctcatccaatctttcaccggttccacctgttggttgcagttcactactgtggcttggtaagaacggataagaatttgataacagcatttcattgagcgagttgtcaccaccatttccctgttgtcgtcggtttttctccttttggtattttggtgtttgcgctaactatggcaggagcacacgacacggtggatgcccagttgctggaagtaagggaacaagttgatggacttgctgctgacattaagatgatgcatgaacggcttgattcgacggtcacttcgacgaccgagcgtttcaaccagcttgaccttgctcaaacagcgactcgcaccacagtcgacaccttcctggcacgccttgatgcattgaccacaacatagaacaggactacggcggtaacactaagggggagatggatatcccccagggttttgcacgacgt

SEQ ID NO: 665 - DNA, 855 bp, Zea mays
  VARIATION (18)..(105): /replace="c" or "g" or "t"
  misc_feature (18)..(105): /note="Nucleotides given in the sequence have no preference with respect to those in the annotations for said positions"
  source: /note="Zea mays BAC clone full insert sequence contig bacb.pk155.h15.fis2"
gccgatcggccattaggaaaaaaaaaaaaaaaaaaaaaaaaaaaaaaaaaaaaaaaaaaaaaaaaaaaaaaaaaaaaaaaaaaaaaaaaaaaaaaaaaaaaaaaaaggtgattttaaacaaggtggcgcgaactcgaaactctagcggtaagaaaactttagaccagcaactcgacccaaatgcagcaaccatgaattcaacaagtcgaaaactaagtagtaaagcaaaggctcaaactgttttaggtgaatttctgctctaaatatatctttgggcaaaagtggactgtaggtaaataaaacaaggaagattgagatctctcaccgagcaacctgaaatttgataccacttgataaacccaacgggtagaagggtgttcgatctttcgatgagagatgatggaggtggaaaacttgttggagaacgacgttggctgcccgactaccacaaccaagatggtgtggcgccttgagcgacaggtacaccgtctcctggtaactacgatttggggtggaggtcgacgttgtgctatccgactacaacaaccacaagggtgttgcgccttagcgatagttacatcggctcctgttgttgccactcttgtcgtgccaagaacagccttgaacctgcaagcaatcgagaacaagcaagaacaagataaaaagcagacactcacagatctgatagagttggggttctgtttcaagtatccgggtggtctagccgacacacgcgtttacaaggaagtagcaaaggctaaacatacatcaaacaaaaacccaagttctttggtggctgctagttgcttaaatagaggaatagaaaggagttctaatggagaacgaaactctctc

SEQ ID NO: 666 - DNA, 846 bp, Zea mays
  VARIATION (6)..(67): /replace="c" or "g" or "t"
  misc_feature (6)..(67): /note="Nucleotides given in the sequence have no preference with respect to those in the annotations for said positions"
  source: /note="Zea mays BAC clone full insert sequence contig bacb.pk155.h15.fis3"
aggataaaaaaaaaaaaaaaaaaaaaaaaaaaaaaaaaaaaaaaaaaaaaaaaaaaaaaaaaaaaaaggaaagtacaacatgagtacatctacaccagcagcaccttctccagcccaggcaccatcttccccagtccaggcgccacccttccacttgggccagtgactcaggctcgtgcaagagaattgaactacatcatgttgttaaagaacgaaggcccagaagattagaagatggtccaataggaaggcccggatggggcgcctaggtaagtcgtgaacagtaaacgtggtactgtagcgtcgacctactgttcacgcctctcctctatttagtcagagtcctgtttcatttagaacttgagttttgttttacatctagctttagctaccccagaacacacacaaatacgtgttgtcctctgtgattcagaactccacctcgagagatattaagattgctcgcatctttttcttgttcgttcttcgattgcgcacaggaaacgatcttcgtgatcaggccgatctcgcataagcaaggtcggtaaccattgggagttggttcagcgattgcattggcgcttcgggttcgctcgtcgtagtcggatcgtgagggtctacttccaccaaatcggaattatctccactcaccgaaagatcgggcactctagctctatcactttcaatatatgcaatctataattcctatcattagcaagaaattatctctcctctcctttagctaaaagtcgccaaagattgtcaacagtgacactacgattatactcctcgcaaaaacataaaataacactcctacataaatgttgcaagcattttaacgtcgtg

SEQ ID NO: 667 - DNA, 1020 bp, Zea mays
  source: /note="Zea mays BAC clone full insert sequence contig bacb.pk155.h15.fis4"
gttgcattctcctgaaaggatcgttttcctactttgcgccgttctaaattgatgctcgtgctgctggtccttttaaggtactaaccaagattaatgataatgcttatatccttgacatgcctgcggagtttggtgtttccactagttttaatgttgcagatttgaaaccgtatgcgggagaagatgaggagttgccatcgaggacgacttcagttcaagaaggggaggatgatgcggacatcaacaccaacacgagcacatctacaccagcagcaccttctccagcccaggcgccaccccttccacctgggccagtgactcgggcccgtgcaagagaattgaactacatcatgttgttaaagaacgaaggcccggaagaatagacgaccagcccaattgcggcccataatggacgacctagggttggtcgcgcctaggggctgcgccccctctctatttattcaggagttgcgcctcctttaatttctgagttttgttttacgttagccttagctactctcgaacacgcgcaaatctgcgctgtcttcgtgtattcataactccaccctcgagtaatagattagattgctcgcagcgtgtgcttgttcgttcttcgattgcgcacaggaaacgatcttcgtgatcaggccgatcgcgcgtcagcaaggtcggtaaccacagggagttggttcagcgattgcattggcgcctcgggcttgctcgttgtagtcggatcgcaagggtcatcttccgccaaatcggaattatctctactcgccgaaagatcgggcacctcagctacatcactttgtatgcaccccaacacctgttttcggaatgggtgacgtgcgacaacgaaattgcacgaaatcatcccaaaaaagagttttggacctaaagttgtggttggtacatgttccttgcaaaaaatgaaagaaagggtttcatggccaaagctcctgcttggtagccacccaacacccgttttcggagtgggtgacgtgaaggcacgaaattgcg

SEQ ID NO: 668 - DNA, 122 bp, Zea mays
  source: /note="Zea mays BAC clone full insert sequence contig bacb.pk155.h15.fis5"
caccgtccggagcttcgagagccccgaggaggtggtggtagtgtgggacaacggcacagctgccaactaccgctgctccggggcttacgacctccgcatcctggacagcgcgcccaccggta

SEQ ID NO: 669 - DNA, 1111 bp, Zea mays
  source: /note="Zea mays BAC clone full insert sequence contig bacb.pk155.h15.fis6"
cttgcaggctcgagtgccctagtggccagggtgtcacgctccacaagatcgtgacagccataggaggtggtgtatcggttgctaaggcgcagcgtctttggaaggctgtagtcgggccgtgaacgtcgtctcctcccccaatcgagttattccacaccctctcatcgaaagatcgggcaatcacccaacgggtgcacatcacaaaccgtgccccgtaccttacgaatccggatgagatgaaggagatccagcgccaggtgcaggcattgcttgataaaggttagattcgtgaatctcttagtccttgctcagttccagttttacttgttccaaagaaagatgggtcatggcgtatgtgtgtcgactgtcgcgctattaataacatcacaattcgttatcgatatcctataccatgccttgatgatatgctagatgagcatagtagtgccattatttttactaagattgatttgtgtagtgggtaccatcagattcgaatgaaactgggtgatgaatggaaaacaacttttaaaacgaagtttaggttatatgaatggttggttatgccgtttggattgagtaatgctccaagcacctttatgcgtttgatgaacaaagttctaaggaccttcataggattgtttgtcgttgtctattttgatgatatccttatttacaacaagactatggaagagcatttcaaacatttgagtgttgtttttgatgcgttgtgtactgcccgcttgatgaagacatccacactactgatgcatctataccaatacaagtaccaatttctggtcccattactcgcgctcgtgctcgtcaactcaaccatcaggtgattacactcttgagttcatgtccatcatatttagaccatggagacccgtgcactcttgttttgcttaggaatcagggagaagaccgaaagggaaaaggatttgaacatgctggattcggactgcagaagaacaccaacttgtgacggtcaccacggtcagatgcgggctcggattggaatgttcaagcacaacatggaaagcttatcaagtctactttcatatggatcgggaattatagtcatatctgttctgaggccgccgttagc

SEQ ID NO: 670 - DNA, 1270 bp, Zea mays
  VARIATION (693)..(731): /replace="c" or "g" or "t"
  misc_feature (693)..(731): /note="Nucleotides given in the sequence have no preference with respect to those in the annotations for said positions"
  source: /note="Zea mays BAC clone full insert sequence contig bacb.pk155.h15.fis7"
agccgttctcctgaacgcgcctgagcaccagaaaatgaaggaggtaagcgagggcatagcgtcattgtttcgcctcatgccggagcaggtaggaccgctgatgacgatggttacatcgatgctgggggttatatgagaggcacaagaaaagaaaaagcccttgaagcggtaacttcaaaggcccttatcacactgtgttacggcaagtaacgggagtaagtatgtcaaacaccgctgaaataatcaatttcccaaataaaaccgaacaaccgggaggtcgtatggccgacctgtcgaacgggtataccaaggtcgctaacgagatccaacagcttaagcctcgcctgagactgtcaggccgggaatggcaatgttttgaggcggtgatctggcttacctacggctggaacaagaaacaggaccgcgtgacaaatacggttattgccgagcttacgggcctgagcgatacgcatgtatcggacgcgcttaagtctctcgcagaacgcaaaatcatcttttcacagaagcagggcatgatgaaaatcgtcggtgtaaacactgacctttcagcatggattttagacaaaccggaaacgggaagaaaattcccgaaaacgggaaaatccttcccgaaatcaggaataaccttcccgaaaacggtagacacccaatacaagaacaagaacagtattaaaaaaaaaaaaaaaaaaaaaaaaaaaaaaaaaaaaaaagcacgtctgaagaaatttttatcaactcatcctgaagctgcggtctacacaccatccggtgcgaagtggggctctgctgaagacctcgagacagctaagtggatttcctccagggtgaagctgattaacccaacctgcaaagccccggacatgacctcctggtctaacactgttcgcctgatgcgccagatagacaaccggtcgcaccaggacatctgcgcgctgtatgactgggctagcaaacaccacttctggcagaccaacatcctgagtcccgaaagcctgcgtaagcagtgggacaagctgacaatgcagcgtaacgccggaggtgagcagcgcgctgtcaagccagatctggacttcaacaacactgactgggcctatggggtgatccgatgaaatctcttgcagagcagatgcgtaaccacgaccgcgagcagatgagccgcatggcccataacctgccagagcagtaccaggagtgcgcgccggtcgagcaggtggcgcaggtattcaacaagctgttcaacggccttcgg

SEQ ID NO: 671 - DNA, 1265 bp, Zea mays
  source: /note="Zea mays BAC clone full insert sequence contig bacb.pk155.h15.fis8"
ggatgtataattattttctgaccttaaaaaatgaaagaataatgattcgaatgaccatgatgcaagctatcagtatcatattgccaaggtcgaccaagtaacaaagagcatgctttcatgggaataacatcacaatcaacaaaatcagaataagcacccatggagaaaggaacacgcacggaatgcgtgatttttattttaacaccatcattaagccattgaatgtgatatgggtttggatgcttacgagtgggtaacgacaacttttcgaccaacatggtactcgccaaattgttgcaactgccgctgtcgataatgatgcgaattgaccgctcctgcacaacaccctttgtatggaacaaaaagtgtcgctgattcttctcgggcaaagcgacctgtgtactaagaacacgctgcacaacaagactttcatacctatcagcgtcgcccgggttgacatgtacctccgcctgagctgcagggttagtggcaagtagtgcatgttcaatttctttagaatcactagcggaagagtactcaccatcgtcacgaatgagcaaagtgcgcttgtttgggcagtctcgaatcacatggccaaatcctctacatcgataacactgaatatcccgtgtacgacctgtgggtggggcagtgctggctggtttggtcgtcttctcgcgtggagtagtggtggacgtggatggcgcagggggaactggtgctgagatggatgtcgagcttcgtcctgcaaaagggttagaatatgtcttcgagcggcgtccctgcacttcacgttcagctttgcaagcatattcaaataaagtagtcatatcataatattccttataatcaagtatatcctggatttcgcggtttaaaccaccacaaaaatgtgccatagcagcgtcgttgtcctccaatatcccacacgaatcatacctttttgtaactcctggaaatagcctcaacagattgagaaccttgctgaaaacgctgcattttattaagcaaatcacgagcataatacgaaggcacaaatcgatgtcgcattgcagctttcaactgatcccaagtggttggaatggcaatgggatgtttcattttatactcacgccaccaaattaaagcaaaatcagtaaattcactaatagcaactttaacctgagaatgtgcagcaatatcatggcatgtaaatttttgttcaacctctaactcccaatcaagatatgcagcacgatcatatttgccattaaaagtgggaaatc

SEQ ID NO: 672 - DNA, 971 bp, Zea mays
  source: /note="Zea mays BAC clone full insert sequence contig bacb.pk155.h15.fis9"
ccgaaactgaatttttaaggctttgtgccttcataggtggccagtccaagactgccctctcccatttgaaagctcgtttcactactacagtaaacctctgtacaggcggtgcaccacaagcggttcctggaaccgcctgtgtagaggctatacaacatctcatgatagccgagccttacatagaggaacacctggatgagcttcgtaaagaaaatcagaaccgcacaggggactggatcatgagggagcacaaacatcgtttcagcgaatgcttaatggacaaaaacatcccattcggagactctttggaagagaaaacaatgaagaatttggcttctgggccatcgtgttttgtgacatcatggcaagcatatgacatcaatgggtacacattctacactaaatcaaaagacatgaaaagtgttgcacaaaatagcgatgttcgtatcgatgcttttgacctacatggacagaagaccacatattttggattcatagaggaaatatgggaacttgattatggcccaagcatgaaaatacctttatttaagtgccaatgggtacaacatcccgtgggggtgatagtggataactacggactcacactggtagacttaaagaaagtaggatataaagatgacctgtgggttctcgccgaatgtgttgcacaagtgttctatgtactcgatccagcagatgagaagatgcatgtagttatttctggaaagcaaaaaattgttggagttgagaatgtgggagacgaagatgaggaatacaataagtatgaagagatgttcgtctttaacggtccagagagaatcaagcgtgtgggaaaagaaaattgataagaactgatgaggacatcaccatcattgatacaaccataccagtgaccacttcaccattcgtagctaatcaaggaccaatgacacgagcccgtgcacgtaaacttaattatcacgtgaactcgg

SEQ ID NO: 673 - DNA, 1991 bp, Zea mays
  source: /note="Zea mays BAC clone full insert sequence contig bacb.pk155.h15.fis10"
tcgactcattgcaatctactacaaaggatgtgcccatttcagatggtaatatggtttgttacttcgtgctcctattgatttaatgcctgtgccatctcctgaaaaactaaattttgatgctactagggcgtgctgaattgatgttaaaactgcacgaaactactaaagaaaacatagagcgtatgaatgctagatataagtttgctagtgataaaggtagaaaggaaataaattttgaacctggagatttagtttggttgcatttgagaaaggaaaggtttcctgaattacgaaaatctaaattgttgcctcgagccgatggaccgtttaaagtgctagagaaaattaacgacaatgcatataggctagatctgcctgcagactttggggttagccccacatttaacattgcagatttaaagccctacttgggagaggaagttgagcttgagtcgaggacgactcaaatgcaagaaggggagaatgatgaagacatccacactactgatgcatctataccaatacaagtaccaatttctggtcccattactcgcgctcgtgctcgtcaactcaaccatcaggtgattacactcttgagtttatgtccatcatatttagaccatggagacccgtgcactcttgttttgcttaggaatcagggagaagaccgaaagggaaaaggatttgaacatgctggattcggactgcagaagaacaccaacttgtgacggtcaccacggtcagatgcgggctcggattggaatgttcaagcacaacatggaaagcttatcaagtctactttcatatggatccggaattatagtcatatctgttctgaggccgccgtaatcattgttttcttaccgagacatttcctgccttttctgcccatggtgctgcgtcaccctattttggcccaatgggtcgtgtatcaagttaggtccattagggacgcatcctagggttgcagcacgactccaatacccttgtggtcgtcctcccatgtttataaaccccctagccgccaccaagaacagcgggttttgtttagatcaagtttagctctcgctacttgcttgcaagcgcgcgtgctagttcagccgcccgtcttcttgtcttcggaaccccaccatattggagtttgatctttaaacctacatttagatctggtaattcagtacttgttctacttgttcttgctagttcttcgattgcttgcaggacgagtgccctagtggcccagggtgtcacgctccacaagatcgtgacagccataggaggtggtgtatcggttgctaaggcgcagcgtctttggaaggctgtagtcgggccgtgaacgtcgtctcctcccccaatcgagttattccacaccctctcatcgaaagatcgggcaatcacccaacgggtgcacatcaccgcttatttggtaacatggacaaatacatcttttgcacacaacgtgtctcgtttcttggttatgttgttactccacagggcatagaggtggatagtagcaagattgctgccaatcgggactagcctacatcgacgatggtaacacagatttagagttttcttggacttgcaggcttctaccgcaggttcatccgtgattttagttccattgcagcccctctacatgagcttacaaagaaaggtgtgccgtttgcttgggacgactcacaggaggtagtgttcaacactttgaaagataagttaacacatgttcccctcttgcagttgcctgattttaataaagtgtttgagcttgaatgtgatgctagcggtattggactaggtgctgttttgttgcaagatggaaagccggttgcttattttagtgaaaaattaagcggtgctagcctgagatattctacttatgataaggagctttatgctttagttcgcactttgcaaacatggcagcactatctttggcatcgcgagtttataatttattctgatcatgaggctttgaaacatattcgtaa

SEQ ID NO: 674 - DNA, 1790 bp, Zea mays
  source: /note="Zea mays BAC clone full insert sequence contig bacb.pk155.h15.fis11"
caaaactctaataaataaaggaggcgcagctcctggataaatagagaggtggcgcagcccctaggggcggccaaccctaggtcatccattatgggccgcagttgggctggtcgtctattcttccgggccttcgttctttaacagcataatgtagttcaattctcttgcacgggcccgagtcactggcccaggtggaaggggtggcgcctggactggggaagatggtgcctgggctggagaaggtgctgctggtgtagatgtgctcgtgttggtgttgatgtcctcatcatcctccccttcttgaactgaagtcgtcctcgacggcaactccttgtcttctcccgcatacggtttcaaatctgcaacattaaaactagtggaaacaccaaactccgcaggcaggtcgagggtataagcattatcattaatcttggttagtatcttaaaaggaccagcagcacgaggcatcaatttagaacgacgcaaagtaggaaaacgatcctttctcaaatgcaaccaaaccatatcaccaggttgaaaagtaactagtttccggcctttactaccagtaatctgatatttagcattagcagcagcaatgttttgttgagtttgttcatggagattaatcatttgttcaacatgtgcaagagcatctatgtgtggggcgtccgcagcatcaagtgaaaacaaagcaataggcgccctaggaatgtaaccataaacaatttgaaaagggcatatctttgtagaagaatgggttgcatgattataagcaaactcaacatgagggcatccaccgtgtcgtgtgctcctgccatagttagcgcaaacaccaaaacacgaaaaggagaaaaaccaacgacaacagggaaatggtggtgacaactcgctcaatggaatgatgttatcaagttcttatccgttcttaccaagccacagtggtgatttgcaaccaacaggtgtaaccggtgaaagattggatgagcgattgcctggagaaacagaatccttctcgtcgtagaaatatgtggagttttgggtaggctgcactcaagtcaaagattagcacgatcaaacaataatgcaaagttgaattatagtgcaaaacacgaaactatattgctgggcacaagtgcaaaggacagatggaactagcagaatggcagtaccgtaaatattatactagcgaggccaaaaatgcactagtaggaatcacatgtgattttgtttttcttttttgtatgattttttgatatttttctcagcacaaggagcaacaaaataggagctacacgaagtttcacctaaaacagagttcagatgtggtctacagaaaatcaggaagttctctgaaaagcgtgcgagaactttgacgaatttttttctttattttcctgaattttttttgacaattttatcgaaaccaaacaggcctcagaatggtgtcaataagctcctgtaaaaatttcagattttttgaacaaccgagcgaaaagttatgcccggtttaaggaaggtatgtttaaaacgaccgagatgagacaaccgctttgtatcctttctccttcgttttcttttttttgtttctgttttttttacgtaaccgaaggagaaaaacaaggaagcggcgttgactcggtttgttttttttctgtttttttatgtaaccgaaggagaaaaataaggaagtggcgttgactcggtttatggcgtgatcaaacgaaatatggtggcggcacgctagggtttgaatggtggaataacacaatgcaaccagcaagtgtcgg

SEQ ID NO: 675 - DNA, 1781 bp, Zea mays
  source: /note="Zea mays BAC clone full insert sequence contig bacb.pk155.h15.fis12"
ggaacagaccgactatggatcaagttgtttagcagttatagcagctcgggcaagatcatctttaacaatttgttcaggtgtcattggatgtataattattttctgacccttaaaaatgaaagaataatgattcgaacgaccatgatgcaagctatcagtatcatattgccaaggtcgaccaagtaacaaagagcatgcttccatgggaataacatcacaatcaacaaaatcagaataagcacccatggagaaaggaacgcgtacggaacgtgtgatttttattttaccaccatcattaagccattgaatgtgatatgggtttggatgcttacgagtgggtaacgataacttttcgaccagcatggtactcgccaaattgttgcaactgccgctgtcgataatgatgcgaattgaccgctcctgcacaacaccctttgtatggaacagagtgtgtcgctgattcttctcgggcaaagcgacctgtgtactgagaacacgctgcacaacaagacttttatacatatcagcgtcgcccgggttgacatgtacctctgccttagctgcatggtcagtggcaagtagtgcatgttcaatttcttcagaatcactagcggaagagtactcaccatcgtcacgaatgagcaaagtgcgcttgtttgggcagtcccgaatcacatggccaaatcctctacaacgataacactgaatatcccgtgtacgaccagtgggtggggcagtgctggctggtttggtcgtcttctcgcgtggagtagtggtggacgtggatggcacagggggaactggtgctgaggtggatgtcgagcttcgtcctgcaaaagggttagaatatggcttcgagcggcgtccctgcacttcacgttcagctttgcaagcatattcaaataaagtagtcatatcataatattccttataatcaagtatatcttggatttcgcggtttaaactgtaacaccccaggtgttgccatggctggagcacaccttggcactcaagactatgatcacatgtggaagaacttaaggagcaaaagtataaggggctttggaaactaagtttttaccaagagttgggaatgaccaaaggcattaccctaattgtgtgcaactatcaccttgggagagggggaaagaaccctaggcctctcttaaaccctatctcccaaaaccatggataagaggggaaagagagtgagcaaatgtgcaaaacatgggtaattttcacccaaaccctaagcaacattataaccatcaattaggggagggaaatattacaaaaaggcccctagggaaaccccatttcaaatctccaagtggagagagagctagagctctctaattccctctaagtcccattttagcaacaagatgtatcatgatctcagatgcaccctggatgttcccaaggaccctgagcttagaaagaagatactggacgaagctcacctttccaaattctccatgcaccctggtagcaacaagatgtatcatgatctcagatctctatattggtggactagaatgaaaagggaaattgccaaatacatatccgaatgtgacacctgccagagaattaaggctagtcacttgaaggcagcaggccatttgcaaccccttcccataccatcttggaaatgggaggacatttgcatggacttcatagtgggattacccaatacctccaggcaccatgattctatttgggttatcgtggacagtttagccaagactgctcatttcttgcccctgcacaccccccttcgg

SEQ ID NO: 676 - DNA, 2002 bp, Zea mays
  source: /note="Zea mays BAC clone full insert sequence contig bacb.pk155.h15.fis13"
atccgagccctcatctgaccgtggtgaccgtcacaagttggtgttcttctgcagtccgaatccagcatgttcaaatccttttccatttcggtcttctccctggttcctaagcaaaacaagagtgcaagggtctccatggtctaaatatgatggacatgaactcaagagtgtaatcacctgatggttgagttgacgagcacgagcacgagtaatgggaccagaaattggtacttgtattggcatagatgtatcagtagtgtggatgtcttcatcagtttggaagctgggcgccggggatgaggtcgatctggtgctcaatgccacgaagcgggggaagacccgatggcaagtccgtggagaaaacatcagcgtactcctgcaaaagtttagaaacagcaaggggaatatcctaaggcgggcatcatcaagtgaaacgagcatactagaacatacaagcgcatagcagggcaagtgagtatcacgtaggtcatcaaaatcagcacgtgtagcaagtaaaacaggagcatgcaacttgatttcagcattaataggggtggatggagtaggtgcatgttgctttgcagtttttgtagcccgagcaagatcatcttttataatttggtcaggggttatgggatggatattattttctgacccttaaacaagaaagaataatgattcgaacgaccatgatgtaaactatcagtatcatactgccacggtctatcaagtaaatgaaattgcgcgaaaccaacccaaacatgtgttttggacgtaaagtagtggattgggcatgttcgttgggaaaaacgaagaaatggttacggtggcaaaaactcgtgctttgtatgcaccccgacacccgtttttggaatgaatgacgtgcggcaacgaaattgcgcgaaaccaccccaaacatgtgttttggacctaaagaagtggatggacatgttcattgcgaaaaacgaaaaaatggttcctgtggcaaaaactcgtgcttgtatgcaccccgacacccgttttcggaatgggtgatgtgcggcaacgaaattgtgcgaaaccaccccaaacatgtgttttggacctaaagtagtggattgggcatgttcgttgggaaaaacgaagaaatggttccggtggcaaaaactcgtgctttttatgcacccgacacccattttcggaatgagtgacgtgcggcaacgaaattgcgtgaaaccaccccaaacatgagttttggacctaaagtagtggattgggcatgttccttgcgaaatacgaagaaatggttccggtggcaaaaactcgtgcttgtatgcaccccgatacccgttttcggaatgggtgacgtgtggcaacgaaattgcacgaaaccaccccaaacatgagttttggacctaaagtagtggattgggcatgttcgttgcgaaaaacaaagaaatagttccattggaaaaaactcgtgctttgtatgcaccccgacacccgttttcggaatgggtgacgtgcggcaatgaaattgcgcgaaaccacccccaacatgagttttggacctaaagtagtggattgggcatgttcgttgcgaaaaacgaagaaatggttccggtggcagagacgtgtgcttgtatgcaccccgacacccattttcggaatgggtgacgtgatgccatgaaattgcgcgaaaccacccccaaacatgtgttttggacctaaagtagtggagtgggcatgttccttgcgaaaaacaaagaaatggtttcggtggcaaaaactcgtactttgtatgcaccacacccgtttttctgaatgcgtgacgtgcgacaacgaaattgcgcgaaaccaccccaacaaagaatttgtggacacaaagtaattgaattggtcatgttcgttgcgaaaaaacaaaaaatatgttacaggtgagcgaaacatcgagcttgtttgcaccccgaacacccatcttcgtatagggtaaacttgcgtaaacacaatggcgtggattctg

SEQ ID NO: 677 - DNA, 1960 bp, Zea mays
  source: /note="Zea mays BAC clone full insert sequence contig bacb.pk155.h15.fis14"
cctacctaattccgctgcacttcgaacaatgatggatacttttgcaaaaactccgatgatgataatggtgatgtaataatttaacattatggcatgtatggttttatgctttattgtatttgctctgtgactcaccttcgagtgagattgtggtacttgatcctgtcagtggccgtgtcggactagatccgagggattgatgggttattcccatttaagtgtggtctagcctctaaggcgggacttggacacttaagttggaataattcgggcagttccgccacagctggtatcggagcttgtaccaccacagaggaatcaataaaatgtaaataccatcaattttctaaataaaacttgatagaaacaagttggatagatagtaggacgagcaggatagacctaggacgtgaagccttaggttaatagaagggtagctaggtggctaagtaactaggccctacagaccacttttacaggatgggagttcctccctattccttctatcttgttgtgaggtcgttcaggacgagcatgcatgcattcaaaattaagcaattggataactgagtaaaagacttaaaaacaagataacaaccaactaggtccctagtgcctttttacttaactagaggagggctgagttttattttccttgttctttttacattctttttcttttacttacgcttgaccgtacacagatgacttcccacgggatcctccgatgaaggaaatgcactgacccacactgacggacttgcacgagagggttttccccgcattttatgggaagtgcttcagggagccggatacatgacaccccctcagtacgcggtgcagcagttcgagaagcaccgagtgccccgctgtagggtgaggatgactctggagcctcatcccctgcagccaggctggcgctccttggactcagagtctttcgggtaccgggcagaggacacgatcgaggcgatcgctctgcatggattgactaccttctgcgggttccatcccttggagctggctacccatcccattggcttgttccccgctgaaaaggaggacgacccaatgtggaaggatcgggtggaacatgccaaggacatctgggccatctacccaggacagactgcgcacttaacagtacggtgcatgaatgctctgtaccgtctgcaagtgatgcgcggtgaggcaatgtcccatttgatggcactgctggaggcaacaaagatcacgctggataaccgagaggagcttgtggttgacctatctcaggaaatggtagagaaagatttgcaagtggagcagctgtctggtgagattcatgagttggaggagctagtgggcacccgggagaacaccattgaggtcctagaggatcagctccttaacactcagcaacagcttgctgaggctaacgagcacctggacatgcatcaccaagagatccaggaccaggaggacgacgaggacgtcgacattgagggaggagatgagcctacctccagtgtggacactgctggctcgggaagaccaccttcccccgagtccagtgttgcttcgttcgctcgctaggtgtccaaggtaggcttagaagtcggacagtcggactcctcgcagctagcttagcttttgcacccttggggtactaggctaggtagggttgagtcattttagaacaaattgatgtaatcatgttaaactctcttgggggcttgtttgaggaatgctattatcagtttaatttggaaggaagaatttatgcctcttaaagaatcccttttgttgaagttagatctttcatgctgtttttaacttttccccgtgttgaaatcttgaaattggaactgtggtgttaagtaagcatgtggtttttcagatggctgggaggcagcgtcgtggccagaacgagcgcgttccaccaccacccccacctcccactctgcaggagctcatggct

SEQ ID NO: 678 - DNA, 1352 bp, Zea mays
  source: /note="Zea mays BAC clone full insert sequence contig bacb.pk155.h15.fis15"
ccgaaagttaccttcggcgccctcatcacgcccaccattgatattagcatgcatctcatcaaaccgcctcaagagtgcgacaaggctcttgtcaatatgagcaactgtcatttccacatttgcaagtttggtgttcgtgtcgatctgtgtggcctccaattgccccatcttttcattcgtcacctgcatgtcattatcaagaccttctgtgtgcgtcttcactagccttacaaagtgttgtatgatacccttggtgcgaggagagtgtggcatattacgagaagcatcatcaacctccaatcctgccatggttagacgaacagaggcaacaagaaaaaaaaacgtgaaggaataaaaactctacaactattaggatgtagctactgcaaggcgctcactctcaacctgccacacaagctcttaccaattcttaccttgcacaacaggaggggtcagcaaccaacaagtctgcaaccgtggaataagtgtatcggtgccgcagcaacacgacctgtcaaactgtagtcgaaatatgtagagttgtaggtgggctgaagcaaggaatacactagtaccacgttagttacaaaagcaagctgaataatcgttcaacggtggtactgtgctggtcctaggctaaaccaggctagagacgtgagcctaggcacaaaggtagtcactgaaaaagaacaactagcacagcacaaagagaaacaacagatttagagattcagcccccttcttcttctttttccttttttttttcttttctattcttttttttttcttcttcttctgttttttttttgcaggggcctaaaccctttttttcactatgacaacccaaacaataaagatattgctaacaacccctttaaatcagatttaacaaatcttgttaatataggaagtccagaaatctctacgatgattgcggagcgctcagaacgaattttgagataaggtcagatccgttggaaagaagataagataagctttccagattgtatttaaacttccaaatcggatatgatatgtatctgtggtggcaaaaacgaaccagagatgtttttggtgatggtggatttcgtggtgaccaaaacgtggtagaactcaaaactctaaaggaataaactaagaccagcaactcgacacaaccgatgcaaccaaaaactaaacaagccctaactaagtagtactagtaaatgctcaatggtttataggattgcggtaaaactaatctactattttttggctttttctggactataggagataagaaaacagcgaagaaaagtaaatctctcaccgataaaccttcctctgataccaactgatgtgcacccgttggg

SEQ ID NO: 679 - DNA, 2302 bp, Zea mays
  source: /note="Zea mays BAC clone full insert sequence contig bacb.pk155.h15.fis16"
cgaacgcctgctcgttgcacgacatgccaaaaggcgaagtctggttaaatccacacggtttgtatttgcctctacccgttcctagtgctccttgggaagatatttctatggattttgtgctgggattgcctaggactaggaagggacgtgatagtgtgtttgtggttgttgatagattttctaagatggcacatttcataccatgtcataaaactgacgatgctactcatattgctgatttgttctttcgtgaaattgttcgcttgcatggtgtgcccaacacaatcgtttctgatcgtgatgctaaatttcttagtcatttttggaggactttgtgggcaaaattggggactaagcttttattttctactacatgtcatcctcaaactgatggtcaaactgaagttgtgaatagaactttgtctactatgttaagggcagttctaaagaagaatattaagatgtgggaggactgtttgcctcatgttgaatttgcttataatcgatcattgcattctactacaaagatgtgcccatttcagattgtatatggtttgttgcctcgtgctcctattgatttaatgcctttgccatcttctgaaaaactaaattttgatgctactaggcgtgctgaattgatgttaaaactgcatgaaactactaaagaaaacatagagcgtatgaatgctagatataagtttgctagtgataaaggtagaaaggaaataaattttgaacctggagatttagtttggttgcatttgagaaaggaaaggtttcctgaattgcgaaaatctaagttgttgcctcgagccgatggacccgtttaaagtgctagagaaaattaacgacaatgcatataggctagatctgcgtgcagacttggggttagccccacatttaacattgcagatttaaagccctacttgggagaggaagttgagcttgagtcgaggacgactcaaatgcaagaaggggagaatgatgaagacatccacactactgatacatctatgccaatacaagtaccaatttctggtcccattactcgtgctcgtgctcgtcaactcaaccatcaggtgattacactcttgagttcatgtccatcatatttagaccatggagacccttgcactcttgttttgcttaggaaccagggagaagaccgaaatggaaaaggatttgaacatgctggattcggactgcagaagaacaccaacttgtgacggtcaccacggtcagatgcgggctcggattggaatgttcaagcacaacatggaaagcttatcaagtctactttcatatggatccggaattatagtcatatctgttctgaggccgccgtaatcattgttttcttaccgagacatttcctgccttttctgcccatggtgctgcgtcaccctattttggcccaatgggtcgtgtatcaagttaggtccattagggacgcatcctagggttgcagcacgaccccaatacccttgtggtcgtcctcccatgtttataaaccccctagccgccaccaagaacagcgggttttgtttagatcaagtttagctctcgctacttgcttgcaagcgcgcgtgctagttcagccgcccgtcttcttgtcttcggaaccccaccatattgtagtttgatctttaaacctacatttagatctggtaattcagtacttgttctacttgttcttgctagttcttcgattgcttgcaggacgagtgccctagtggccagggtgtcacgctccacaagatcgtgacagccataggaggtggtgtatcggttgctaaggcgcagcgtctttggaaggctgtagtcgggccgtgaacgtcgtctcctcccccaatcgagttattccacaccctctcatcgaaagatcgggcaatcacccaacgggtgcacatcaacatgtttgggggggtggtttcgcacaatttcgttgccgcacgtcaccattccgaaaacgggtgtcgggttgcatacaagcacgagtttttgccacagaaaccatttcttcgtttttcgcaacgaacatgtccaattcactactttaggaccaaaacacatgtttggagtggtttcgcgtaatttcattgccgcacgtcacccaatccaaaaatcggtgtcggggtgcatacaaagcacgagtttttgccaccggaaccatttcttcgtttttcgcagcgaacatgcccaatccactactttaggtttaaaactcatgtttggggtggtttcacgcaatttcgttgccgcacgtcacacattccgaaaatgggtgtcaaaggtgcaaaca

SEQ ID NO: 680 - DNA, 2176 bp, Zea mays
  source: /note="Zea mays BAC clone full insert sequence contig bacb.pk155.h15.fis17"
cccgatagcaagctcccgaggatgccatcgaggatctccccgcatccccagctattgaaggtaagccccggtttatgcataaccgtattattatatgctactttactacatttaatgcttgtaggattgtaatgttcacttaagtgtaggagttgcttgaaacctctagttgcatgaacttaagattcctttttgagatggatactagtatgctaggtcgagtagctgctatgctaatcaggatctcggtagaagtcgagtgatttttctagcactcgtgcgaggtcaggaattgattgtattcaccttgataacaggatctatgttagtctatggacttggatccagggaggatgccttgtccatgagacgggaaaaaggaattaaggattaatgtgtggatacatgagtcaagcatttgaacgtactaaacacatgtcgggaaatatggtaaccggtaaacctagtacctgagtgaagccgagcgcggactttatccctcacgcgacctaagactgggcctgccatgctagctatggtgggtacaagtgcggtcactgcacggcggcagccggggtcagtggagcattgtatgccaaggcggtgaggcctggacgcgaacggggaatcaatggggacggttgacatgtgtggggtcggagtaccctgacatgtcgtgtgtttaggtttaccttgtaaggataaaaactcgattcgaatcgtttgcttctcgcagctaaggagactgcttgacccctttactacattgagtaagaagtgaaatgaggttacatgagacaatttgttgattgaactaaatgcttgttaccatgtatgcttagaaggagcaaacttagctaagataatgatactagaatttgaaaagctaagaaatgattttagaaacagctagtgcttttggcaaaccaaacccctcagccaaacagctgcatggtctagaggtagaggagtagatttctcataccgggtaagtctagctgagtattagtatactcagccttgcttgtggcataatttttgtagttacgctttaggatatggttgatggtgtgacttggcctaccaccctgccggtggttggacggtcgagtgggatgctgctccggcagaagaggaacatgaggagtagtgggctaggctgataaacccaacaggtagaagggtgcccgatctttcgatgagagatgatggaggtggaaaacttgttggagaacgatgttggctgccggattaccacaaccaagatggtgtggcgccttgagcgacaggtacaccgtctcctgataactacgatttggggtggaggtcgatgttgtgctatccgactacaacaaccacaagggtgttgcgccttagcgatagttacaccggctcctgttgttgccgctcttgccgtgccaagaacagccttgaacctgcaagcaatagagaacaagcaagaacaagataaaaagcagacgctcatggatctgatagagttggggttctgtttcaagtacccgggtggtctagccgacacacgcgtttacaaggaagtagcaaaggctaaacttacatcaaacaaaaacccaagttctttggtggctgctagttgcttaaatagaggaatagaaaggagttctaatggagaacgaaactctctcggtagtttctggacgcctcgtttggtttctgtcattgattcttgatgcacctcaaagtagacgaagagaactttccaacaagtagttatttgcactaaacaaccttgggagtggaaagttatgctccatttaatttggtgtatgctgttacgaaattgacttgggtagagcatgagttcactcggcagtttctggacgcttagtgatgcggacatcaacaccaacacgagcacatctacaccagcagcaccttctccagcccaggcgccaccccttccacctgggccagtgacccgggcccgtgcaagagaattgaactacatcatgttgttaaagaacgaaggcccggaagaatagacgaccagcccaattgcggcccataatggacgacctagggttggccgcccctaggggctgcgccccctctctatttattcaggagctgcgcctcctttatttcctgagttttgttttacgttagccttagctactctcgaacacgcgcaaatctg

SEQ ID NO: 681 - DNA, 4164 bp, Zea mays
  source: /note="Zea mays BAC clone full insert sequence contig bacb.pk155.h15.fis18"
cccacatttgtgatctgctttaggtgaaacttcgtgtagctctattttgttgcttcttgtgctgagaaaaatatcaaaaaaatcatacaaaaaagaacaacaaaatcacttgtgattcgtactagtggcctcgctagtacaatatttacggtactgccattctgctagttccatccgtcctatgcacttgtggccagcaatatagtttcgtgttttgcactataattcaactttgcattattgtttgatcgtgctaatccttgacttgagtgcagcctacccaaaactccacatatttctacgacgagaaggtttctgtttctccaggcaatcgctaatccaatctttcaccggttccacctgttggttgcagttcaccactgtggcttggtaagaacggataagaacttgataacagcactagtgtgagcgccttgtgagcagtacacccctgtttttgtcgttggtttttctccttttggtgttttggtgtttgcgctaactatggcaggagcacacgacatggtggatgcccagttgcaggaagtcaggggacaagttgatggacttgctgctgacattagaacgatgcatgaacggcttgattcaacggtcacttcgacgaccgagcgtttcaaccaacttgaccttgctcaaacggcgactcgcaccacactcgacaccatcctggcacgccttgatgcattgaccacaaagatggagcaggaatacggtggtgacactgagcaggacgatggagatcgccgtggtcgtgcacgtcgtgtggttcgtcacccccctaatgacttattttctaagattaaatttaaaattccatcttttaatggtaaatatgatcctgctgcatatcttgattgggaattggaggtagaacagaaattttcatgccatgatattcctgctaatagccaagtgaaggctgccattagtgaatttactgattttgctttaatttggtggcgtgagtataaacaaaaacttcccattaacagtgtcattacttggacccaattaaaaactgccatgcgccacagatttgttccttcctattatgctcgtgatttgcttaacaaaatgcagcgttttcaacaaggttcacaatctgttgaggaatattaccaggagttgcaaaagggtatgcttcgttgtggtttggttgagtcagatgacgctgctatggcgcgttttcgtggtggtttgaacagggaaattcaggatatacttgattataaggattattttgatataaccacattgtttgaatatgcttgcaaagctaaacgtgaagtgcagggacgacgatcaaagacatatactaactcttttgcaggccggggtccaacacacagctcaactccttccagccctgcaccttctacgcctagcactacatcgcgcacagggacgaccaagccagtggcgccccctgccaaaggcgccgcttcttccacaggacgtacacgggatattcagtgccatcgttgcagagggtttgggcacatgattcgggactgcccaaacaagcgtaccttgcttatacgtgacaatggtgagtactcttcagccagtgattctgaggaaactggtcatgctatgattgccactaaccatgcagaaaatgaggaagtccacgttgatcccatcgacgccgataggtatgagagtcttgttgtgcagcgtgttctcagcacacaggttgcccaggccgaaaaaaatcagcgacacactctattccataccaagggccgtcgtgcacgaacggtcgattcgcatcatcatcgatagtggtagctgcaacaatttggcaagtacagcgttggtagagaaattatccttgcccactcgcacacatccacatccgtatcacattcaatggcttaatgatggtggtaaaataaaggtaacacgttcggtacgtgtccccttttcgctgggttcttattctgattatgctgattgcgatgttattcctatggaagcatgctctttgttattgggtcgaccttggcaatatgatactgatagtttacatcatggtcgttcaaatcattattctttcatgtttaaaggccagaaaataattatacatccaatgacccctgaccaaattttgaaagatgattttactagggctgctaaaattgcacaacaagtcaaatcgacatcagctgcacctattaaatctgaaatcaagttgcactctcctgttttacttgttacacgtgctgattttgatgatctccatgaagctcatatgccttgttatgcacttgtatgctcgtgaatggttgttccgcttgatgatgcaccgtctttggatataccccctgctgttgttaacctttcgcaggagtatgctgatgtttatcctacagacttaccaccgggtcttcctcccctccgtggcattgagcatcagatcgatctcatccccggcgcttctcttccgaaccgcgccccgtaccgtacaaatccagaggagacgaaggagatccagcgccaggtgcagacactgcttgataagggttacattcgtaagtctcttagcccttgctcggttcctgttttactcgttccaaagaaagatgggtcatggcgtatgtgcgtagattgtcgtgctattaataacatcacagttcgttatcgatatcctattccacgccttgatgatatgttagatgagcttagtggtgccgttattttctctaaggttgatttgcgtagcggttaccatcagattagaatgaaactcggtgatgaatggaaaacggcttttaaaacgaaatttggtttatatgattggttggttatgccatttggattgactaatgctcccagcacctttatgcgtttaatgaacgaagttctacgggccttcatagggttgtttgttgttatttatttcgatgatatccttatttacagcaagtctatagaggagcatttagaacatttgcgtgctgtttttgatgctttgcgtgctgctcgcttgtttggtaacatggaaaagtgcatattttgcacgcaacgtgtctcgttttttggttatgtggttactccgcagggcattgaggtggatagcagcaagattgctgccattcgggagtggcctacaccgacgacggtcacacaaattcggagctttcttggacttgccggtttctaccgcagatttgttcgtgattttagctccattgcagcgcctctacatgagcttacaaagaaagatgtgccgtttgcttggagtgattcgcaggaggtagcgttcagcactttgaaagataagttaacccaagctcccctcttgcaattgcctgattttaataaagtttttgagcttgaatgcgatgctagcggtattgggctaggtgctgttttgttacaagaaggaaaaccagttgcttattttagtgaaaaattaagcggtgctagtctgaaatattctacttatgataaggagctttacgctttagtgcgcactttgcatacatggcagcactatctttggcatcgtgagtttataatccattctgatcatgaggctttaaaacatattcgtacccaaacaaatctgaaccgtcgtcatgctaaatgggtagaattcattgagtcctttccttacattattaaacataagaacgggaaggacaatgttattgctgatgctttgtctcgtcgctataccatgctgtcacagttagattttaaaatctttggtttggacactgtgaaggatcaatatgttgacgacgctgattttaaagatgctttcggccattgtattaatgggaaaccatggggcaaatttcacatacaggatgggttcctgtttcgcgctaacaagctgtgtgttccagctagctcggttcgtcttttgttgttacaggaagcgcatggaggcggtctcatggggcattttggcgtctacaagacacatgagtgttggctgcccacttcttttggcctcggatgcgcgctgatgtggagcgccttgttgcacgctgcactacttgtcagaaagctaagtcacggttgaacaaccatggtttgtatatgcctttgcctgtccatcatctccttggcttgatatctctatggactttgttttgggcttgcctagaactaagaaggggagggatagta

SEQ ID NO: 682 - DNA, 3002 bp, Zea mays
  source: /note="Zea mays BAC clone full insert sequence contig bacb.pk155.h15.fis19"
caacaacctattgaaaatttcttgtgcatagaatttctatttcatctagatatgttgtttcttcactttgtgcaaataagatattggcatgttctcaagaagaaaagaatctcttgtttccatgtactttagtagaagttttaggtttatatttgaaagacattaataaaagcttagtcatcaacatcaatcatgatgcaacaccgaggacggtttgctgtcaagaaatggagaatgatgagaacataacccgcacagatatgaccatgttaatggctcctgctacaaagacattgaggaataaagaagttgattggggaccaagtaatgatatttccaacatttccaacaaagcaagcacatcatcaaatttaaagatatacttgggtgaggagcatacactagagtcgaggacgactctattacaagaaggggaggatgatgagtacatcactgccatcaatacaccacaccagctaccctcttcacgatttaatcatggaccagtgaaacgagtccgtgcacgtaaatttaattatcaggtgaactcgttccttgttgttgaagctaatcattccttaaatgaggtactaataccttgtgattactttattatgctaaggtgtttggtaggtgaaccatctagaactttgagaaggcaacatggcaataaaagctgctccacttgaggggatttcgaaactacaacaagtgcaagtttaagaggacatatctttcagctcccaaggttgtttaatgcaaataagtacttgttggaaaggtctctttgtctactttctagtagatcaagagtcaaggagagaacgcatccaaggcgtccaggaacggccgagacaacttcatgactccaccagcccgagtgatttcgtaattgcaagcactaaattaaatggagcatatccttcaactcccaaggttgtttaaagcaaataagcacttgttggaaaggtctcttcgtctactttctagtggatcaagaatcaacgagagatcagacactaagtgatgtagctgaggtgcccgatctttcggcgagtagagataattccgatttggcggaagatgacccttgcgatccgactacgacgagcaagcccgaggcgccaatgcaatcgctgaaccaactccctgtggttaccgaccttgctgatgcgagatcggcctgatcacgaagatcgtttcctgtgcgcaatcgaagaacgaacaagaaaaagttacgagcaatctaattatcactcgaaggtggagttctgaaatacacgaggacagcgtagatttgcgcatgttcaagagtagctaaagctaattgtaaaacaaaactcaagtctgacaagaaaagaagcctccatctaaatagagggagagaggggggcgcagcccctagggaatggcggccagggagggggcgcagcccctagtggtggacagccctaggcgcccacacaagggcgtcagttgggccagcgtctaatcttctgggccttcattcttcagtagcatgacgaagtttagatctcttgcacgggcccgagtgattggtccagataaggaagaaggtggcgcctgaggagaaggtgcatctggtggcgctggaaaaggtgctgctagtgtagttgtactgctgttgtatttgatgtcctcatcatcctccccttctagaaccgaagtcgtcctcgacagcaactcctcatcctcacccacatatggtttcaaatatgcaacattaaaactagtggaaacaccaaattccgcaggtaggtcaaggatataagcattatcattaatctttgttagcaccttaaaaggaccagtagcacgaggcatcaatttagaacaacgcaaagtaggaaaacgatccttgctcaaatgcaaccaaaccatatcaccaggtgcaaaagtaacacattttcttcctttactaccagcaacctgatacttagcattagcagcagcaatgttttggtgtgtttgttcttggaggtcaatcatttgttcaacacgtgcaacaacctcgatgtgtggggcatcctcagcatcaagcgaaaacaaatcaataggtgcccgaggaatgtaaccataaacaatctgaaaggggcacatctttgtagaagaatgtgttgcacgattataagcaaattcaatatgaggcaagcaatcatcccaacgtctcaaatttttgtctaaaacagccctaaccatggttgataaagttctattcaccacctcagtttgcccatcagtttgagggtgacaagttgtactaaacaacaatttagttcccaatttattccaaagagatctccaaaaatgattgagaaaccatcacgatcagagactattgtattcggaataccatgcaaacgaataatctctcgaaagaacaattcaataacactgctagcatcatcagttttatgacagggtataaaatgagccattttggagaatctatcaacaaccacaaaaatgctatccctccccttcttagttctaggcaaacccaaaacaaagttcatagaaatatcaagccaagggaacgtagggacaggcaaaggcatatacaaaccatggttgctcaatcctgacttagctttctgacaagtagtatagcgtgcaacaaggcgctcgacatcacggcgcatccggggccaaaagaagtgtgcggccagcaccccgtgcgtcttgtagacgccaaagtgtcccatgagaccacctccatgcgcttcatgtaacaacaaaagacgaaccgagcttgctggaatacacagcttgttagcgcgaaataggaacccatcctgcatgtggaaatggccccatggtctgccatgcatgcaatgtattaaaacatctttaaaatcagcatcgttgacatattgatccttcacagtttgcaagccaaaaaatttaaaatctaattgtgaaagcatatctacgaggcggcacattagcaatgacattttccttcccgttcttggattcgg

SEQ ID NO: 683 - DNA, 2848 bp, Zea mays
  source: /note="Zea mays BAC clone full insert sequence contig bacb.pk155.h15.fis20"
ttttataaaattgttatttcaattttttaaaattcaagatcacgcgaaccaattagaagctaccacatgtaaacagacaatgggtaccaactgatcaggttccaacatggttggtggtcagcaacttaagagatgcattaattgagacgacaccgagctgccccatcattcggttggactggtcttaccgtgacttgccgtcccatgcacagactcctcgtttataacacctcaaaaccctattttgggatttataaaggttctccaaaagatttgagtttaaatgtattttaaaagtataaagaaaataaaaaaagaggttcaaactttggtagttcaaacttgaagttaaaaactctaaactaaggttaaaacagagaacatagaaacattttcaattgtttaattagcaaaactattcattatagtgcctaggaaccatctcttcgtaggaaataatcacaaattcttgtacaaataaaactatttagaattaatgtttaaagaatattcagcaaaagatttaagatgatatatgaggaattgttttcttagaatagtgtcttttgtgtatataagtttcatattaagaaactctttgtttaatagataaaataagataaataaaatggaattatgcatttcatgttgggtctttggatgttgcattaaaattgaagcttgagaatcaaattaaatttgaatttggaattcaaaactgacattgaaaggaatcaggattttagaaaaaaataagaaaaaaaagaagacatatcagcctctcaaggttgaatctgcctcgttggctcgataagcctgcacctccgcaccggcacatgaacagatcagcgccgacaggcctaccccacctgtcagccatgcggggcctgccgcttagccccagacgtcgtgcgcaagtcttcaacgtcgagcgctcggttttgctgccagtgtgcccatcatgtcaggcttatcccctctaccagaatgttgtgggcgccgccatggatcccgcttggatccttccccaatccaatcctagtccactgcatctcataaatagaactggccatgatcccccctctactcaatcctattgatgagagaaaaattgtggccatgttgtggagctgggatcaccggagccgtgcgtaagcaccgtcatgagagagcaccgctgccgccgtcgatccgccctgtgtgtgaccccctaacctcgatgggtggtacttgggtgtcccaggttttcgtcacgcatgttggtggcttcaccaggcgagaaccacggtcgggggaaccgacaattgctcatcagagcaatcctcctctgcggtgtcgctcgcaaccgtgggcaggagcgtctgcgctgacaacagaggtaagaaacaatctatgtagtttgtgttgcccctcgtgttccactagttcatttcgagttttgtgcaccgggagccgctcgggcttgttgtcggccatggcgccgccgtgggaaaaacgcgacgccatgggcttcagcgcgccggccctggctctcgtcaaggctgaggaggtgagtgatgaccatcggattctgatgaacgctcttgattaaaagaaacatacctcttcgattcatttgatatgagccgttgatcggctatcggatgagttagatcagatcgcgccatcatcggattacggactgcggatcagagatcaaacaattatgaataggtctgattcaccttttaatcaggtgccttcatcagggatcccacgatcccggttgtattccggttcatttaaagtaggttctaatcggggccgttggatgtggatagggcaactctagttggctcgtacccctttggccagggaatctttccaaagagcccctctagattatatgaatcaacccacaatctagccccatttaaaaatcaatgccaacgggtccttacttttataaaataaaccctgactttcttggaattggtatctgtcgtccaaaatttaacttatttacataaaataaaatctagaaaatgatttttgatataaaaataaatctaaaaatcttagataaatcataacttgaccattttaatctgatttagtctgttccagttgcattagcttcttaataatattccctatgcttttgtaacattattttatcatgtaacatgttctcaaaataaataactaatttgtttaacctatgtctattgtattaactaatttaactagagttagtatattattttaatttggatcatctataatttgtctggaatataatttaattgtaacttagattaaaagttgagttagatatatcttttctcacatgatttatatagaatatatttaatcacctaaaactttaggaaatcatatcttttttaatcgtaactctgattttttgtggttctcgaacctatgatctcgtagcagcgcgtagaatattcttacactgtttgttcttatgctttggtgtaatgttaccatacccattatttgcttgactgtatgtattgctatgcatagcagcgaggtcacgagaaacccgaagaccaacttggtgaagtacttggaatctcaagtcacaggcaagttatgatcttaatcactcttctttacctaataatgttcctgttaatcactatgacatgctcagtttaatttgttgggacccaataggttaccctagttttgtttaccccacaccttgcaaacaaatgaacaattgggtagacttgttattgctctacctagttttgggattaatgttatactgaactatgatcatgttccactattgttgttggtttaattatggttcatgataagactattgtgctatcgg

SEQ ID NO: 684 - DNA, 3784 bp, Zea mays
  source: /note="Zea mays BAC clone full insert sequence contig bacb.pk155.h15.fis21"
ttaacccttgatggtgaatgatccacttaaatcagagagagtttaatcttgctactaaagatttttggtggtatacttagtaatttagatcacactcagtgaaactaagtggtaagtccattttggtgttccactgaattctttttaaagccttagtgagaattgtcaagatttcaagttgaacttattggggcgaggtttatctttcatttctttccctctatttcttttatgtttttagagtgggtttgaactacaagttgtcttaataaatttccaaaaattctgtaaaaattacagtggcttattactggtgtataattctctgtcctaaaatttggggcttaaagggtgaatagttctctctggataaaattatcaaatattaggacagaaggggtgttttgaaccacaactaccatttaacagtagtttatcctctaaaacttatttttgctggcatttagatgttataacatgactttgtacaaacttttagccattgatatcctctagtcattttactatgattttctaaagtttctagtcaaaggggtgctttctactaccactatattcaaaaaatatcaaacaacatatttctgatttttcctagcttcttctttgtgcaagagcaatcattctgaattttggcatttgttttcttaagggaatggtggtaggaattatttggattaaatagcctttttcataaagtattggcaataggtattattttgcatctttcaaatgggtttgtatttttttctggtgggctatctcattattgatctagcaaaattttatttgcccattattgcattattttgggttactcatgatttatttgaaatatgactcattatcaagttctatttgtgaccctacttaaaatgatgggctggggtgttatcatttttgtagtggggttctactggttacacgtccactggatttttattaacaattttggatttgtttttataattccaataattgttttctagttggaataatgctaaataaaacatttcactttaattctgttctggactagtggcccctttatttttcctaggttctctgttacttaagtaggctacgaaaaataatggcactcattgttcattattttctaatgtatttctgattttcctaagttttgggcaaaaatggcttttaatagatatccctactaaatttttcaatactcgggttctcactatttttaaacagtgtttaaatggggtttgaacatctacaaattttcttaggttcagcacagaagcataactaattttctttaatttaacaaggtttagtcagtttctgtatttaattccaaactctaaaatttagaacagaaagcatgaggttcagtatttttaattggtagtccatcatctttagaatctagcaaaattggtttgataaattttggttaagtatttctcaagttatgaatttcctaagttctctgtttattaaaaagattaaacagaaatgattaaatgggaaacgactttgcaacggggtccctggcaggtgttttcaagtttccttacagactagtccttgggctactattcaaatgtgtcgctgacagttcagaaaacctcctggggttcctctaaacctaacccgaggtccttcccccaaattaaacagtacccgcggcggaggaaagggcggaggggcttacgggcggcgagactgctccggtgaggtggccgagggtgtaggggaggtcctgagggtcacggcgatgtgcgggtcgccgtcagggatggtcggagtcggccggtccacgtgcgcaagcgggggagctcgtcggcggcgaggagttcggcctatccagggcacaattgaccaatcaaatgggtcagagagcttcaccagggatcaaggaaggtgtgtgtgctaggaattgaagaacggctcaccggattgctcggtctacgcgcgaaggcgggcgaccgaagtccggcgaggacgatcttggttctcaagtgaagttttgtcgggtccgagagcttgggaagcttcacaagctattgacgaagctaaccgagcgactggtgcggcttagaagcgactggagtgggctagccacggtggccgaggctcgagtggcaatggcgggcggatgagagctcactggagctaaggaggggcgtctggccagtgaaggtgagcacggggtgaggtgaggcgcgcccgggaaggctttataggcgcgggcgggcacggccgagggcgaggctctgacaagtgctcggggcgtgcgcgggagaacgccagtgcgcgctctagcgcctggcacagcgtcgagcacgagacagcgcaattagggttggtattagggtttcaacacttttccctttttgaaaaaccttatttgtttggaacatggttctttagatatacacttagtagatcttttcttctcaagttaatttgatgcttcatgcttaatttggctcacataaaatgttaatacttgggttagcactgagagaaaccctaggtgacactggggtgtcacaaccttccccccttaaaggaatctcgtcccgagattcgggtcagagtccttccggggtgaagcgaagggtgagacttacaagaagtgggtgctctattattagggcaaactgctcttcgaatgtcattctctttgcaacttcagaaggaagtccttttaaattttgattcataattacttcattctgatctaagattatatttctgaaatttagattcgaagggcaggaggaggggttgggtatgattacgtaccaatttccttaggtaggtaatcggggaagttggatcgcaagaattcctcagtctcccaagtagcctcttcctctgagtaattactccactggaccttatacaacttgattgatttagcccgagttgatctttccttgcaatccagaatcttggaagggtactcttggtacgatagatctggctctatctccaattctggttctgctatgatctcggtcggcaatcgaacacacttcttcaactgagacacatggaacacattgtggatgacacacatttttggaggtaacttcaatttatatgccacgagtccacatgcttctatgatctcataaggtccaatgtaatgaggggctagcttgcctttgattccaaacctctgcactcccttggtgggtgatactttcaaatacacgaaatctcccacctcgaactggagaggtttccttctcttatcatggtaactcttctgcctggcctgagcagcttctagattcttcctgattagtttgaccttcctttcggcttcagtcactaagtcaggtccgaaaacttctctttctccaggctgagaccaattgagtggtgttctacaccttcttccatagagacctttgaaaggtgccatccttaggctggattgataactgttgttatcactactacaaaacatgttatatgagacggttaatttttagttcttaagacgcttatgaagtgtccaaatttgatggagtcgtaaaagatgtcccacatttaagatggttataaaccgtattaaaagatattatataagacaatttttaatttataaccgtctgaaaaaggtatttgtttaagtcattttttccgataaaccatcttgaattaggtttttgtttaagacactgcttctaaagaaccgtagagaatacaaacattataagtcataaagtatttatcaaactgtctcgaatatcctacaataatagaaagattacaatag

SEQ ID NO: 685 - DNA, 4800 bp, Zea mays
  source: /note="Zea may BAC clone full insert sequence contig bacb.pk155.h15.fis22"
tatgctgctcactaaaaaattgacttgggtagagcatgagttcactcggcagtttctggacgtttagtgtctgatctcttattgattcttgatctactagaaagtagacgaagagacctttccaacaagtgcttatttgctttaaacaaccttaggagttgaaagatattctccatttaatttagtgcttgcagttacaaaatcacacgggctggtggagtcatgaagttgtctcggccgttcctggacgccttggatgcgttctctccttgactcttgatctactagaaagtagacaaagagacctttccaacaagtacttatttgcattaaacaaccttgggagctgaaagatatgccctcttaaacttgcacttgttgtagtttcgaaatcccctcaagtggagcagcttttattgccttgttgccttctcaaattctagatggttcacctaccaaacaccttagcataataaagtaatcacaaggtattagtacctcatttaaggaatgattagcttcaacaacaaggaacgagttcacctgataattaaatttacgtgcacggactcgtttcactggtccatgaataatggtgaagggggtcgctggtgtggtgtattgatggcagtgatgtccttatcataggccttgcccatttcctcgctatcgacgacatcgattatccgttgtatcttattttatgaactcttatcagcaacttgaaaaactccgatttatgtaataattcagtactttcatttgaggtttcctgttttattgtatttcttttgtgactcaccttcgagtgagtatgtggtatttgatcctggttaagtggctctatcagactagatctgagggactgacgggttattccgatttaagtgtgttgcagcccttgaggcgtgacttaggcacttaagctggaataattcgggcagttctgccacaatttcgttgtcgcacgtcacccattccgaaaacgggtgtcggggtgcatacaaagcacgagtatttaccaccggaaccatttcttcgtttttcgcaacgaacttgcccaatccaatactttaggtccaaaactcatgtttcgggtggtttcgcgcaatttcgttgcagcacgtcacccattccgaaaacaggtgtcggggtgcatataaagcacgagtttttttccaccggaaccatttctttgttttttgcaacgaacatgcccaatccactacattaggtccaaaattcatgtttggggtggtttcgtgcaatttcgttgtcgcacgtcacccattccgaaaactggtgtcggggtgcatacaaagcacgagtttttgccaccggaactatttcttcgtttttcgcaacgaacatgccaaatcgagtatgttaggtccaaaacttatatttttggtgatttcgcgcaatttcgttgccacacgtcacccattccgaaaacgggtgtcaggtgcatacaaagcatgagttttggccaccggaaccatttcttcgtttttcgcaatgaacatgctcaatccacaactttaggtccaaaactcatgtttggggtggttttgcgcaatttcgttgccgcacatcaccctttccgaaaacgggtgtcgatgttcaagcacaagtttttgcctccgtaaccatttcttcgtttttcacaacaaacatgcccaatccactactttaggttcaaaacttatgtttggggtggtttctcgctgatagagctggagtgcccgatctttcggtgagtggagataattccgatttggtggaagtagaccctcacgatccgactacgacgagcgatcccaaagcgccaatgcaatcgctgaaccagcttccaatggttactgaccttgctgatgcgagattggcctgatcatgaagatcgtttcctgtgcgcaatcgaagaacgaacaagaaaaagatgcgagcaatcttaatatcactcgaggtggagttctgaatcatagaggacaacacgtatgtgtgcttgttctggggtagctaaagctagatgtaaaacaaaactcgaagaacaaaggtggcacagctcctatataaatagagagagggggcgtagcccctaggggcggccaaccctaggtcgtccactatgggccgcagttgggctggtcgtctattcttctgggccctcattcttcagtagcatgacgaagttaagatctctggcacgggcccgagtgattgacccagctaatgaaggaagtggcgcttgatgtggaggtgctgctggtgtagtcgtactcatagtgatgtcctcatcatcctccccttcttgaagtgaagtcgtcctcgacggcaactcctcatcctcggccatatatggtttcaaatctgcaacattaaaactagtggaaacaccaaattccgcaggcaggtcaaggatataagcattatcattaatctttgttagcaccttaaaaggaccagcagcacgaggcattaatttagaacggcgcaaagtaggaaaccgatcctttctcaagtgcaaccaaaccatatcacctggctcaaaagtaacaagttttcttcctttactaccagcaacctgattttttgcattagtagcagcaatgttttgttgagtttgttcatagaggttaatcatttgttcaacatgtgcaacaacatctatgtgtggggcgtccgcggcatcaagcgaaaacaaagcaataggcgccctaggaatgtaaccataaataatttgaaaagggcacatctttgtagaagaatgtgttgcatgattataagcaaactcaacatgaggcaagcaatcctcccaacgtttcaattttttgtctaaaacagccctaagcatggtagacaaagttcgattaactagctcagtttgaccatcagtctgagggtgacaagtggtgccaaacagcaatttagttcccaatttattccatagagatctccaaaaatgactaagaaacttagcatcacgatccgagactattgtattgggaataccgtgcaaacgaatattctctctaaaaaacaattcagcaacattgctagcatcatcagtcttatgacaaggtatgaaataagccattttggagaatcgatcaacaaccacaaaaatgctatccctccccttcttagttctaggcaatcccaaaacaaaatccatcgaaatatcaatccaaggggaagtaggaacaggcaaaggcatatacaaaccatggttgttcaaccgtgacttagctttctgacaagtagtgtagcgtgcaacaaggcgctcaacatcagcgcgcatccgaggccaaaagaagtgggcagccaacacctcatgtgtcttgtagacgccaaagtgccccatgagaccgcctccatgcgcttcctgtaacaacaaaagacgatccgagctagctagaacacagcttgttagcgcaaaacaggaacccatcctgtatgtgaaatttgccccatggtttctcattaatacaatggccgaaaccatctttaaaatcagcgtcgtcaacatattgatctttcacagtgtgcaaaccaaagattttaaaatctaactgtgacagcatggtatagcgacgagacaaagcatcaacaataacattgtccttcccgttcttgtatttaataatgtaaggaaaagactcaatgaattctacccatttagcatgacgacggttcagatttgtttgggtacgaatatgttttaaagcctcatgatcagaatgaattatgaactcacgatgccaaagatagtgctgccatgtatgcaaagtgcgcactaaagcgtaaagctccttatcataagtagaatatttcagactagcaccgcttaatttttcactaaaataagcaactggttttcgttcttgtaacaaaacagcacctagcccaataccgctagcattgcattcaagctcaaacactttattaaaatcaggcaattgcaataggggagcttgggttaacttatcttttaaagtgttgaacgcttcctcctgcgaatcactccaagcaaacggcacatctttctttgtaagctcatgtagaggcgctgcaatggagctaaaatcacgaacaaatctgcggtagaaaccggcaagtccaagaaagctctgaatttgtgtgaccgtcgtcggtgtaggccactcccgaatggcagcaatcttgctgctatccacctcaatgccctgtggagtaacaacataaccaagaaacgagacacgtcgtgtgcaaaagatgcatttttccatgttagcaaataactgggcagcacgcaatgcatcaaaaacagcacttaaatgttcgaaatgctctttcttatatttgctataaataaggatatcatcaaaataaacaaccacaaacaatcctatgaagggcctcagaacttcattcatcactcgcataaaagtgctgggagcattagtcaatccaaacggcataaccaaccattcatataaaccaaatttcgttttaaaagtcgttttccattcatcacccagtttcattctaatctggtggtaaccactacgcaaatcaatcttagtgaaaataatggcaccactaagctcatctagcatatcatcaaggcgtggtataggatatcgataacgaatagtgatgttattagtagcacgacagtctacacacatacgccatgacccatctttcttgggaacaagtaacactggaacagagcaaggctaagagactcacgatgtatcccttgtctagcaacgcctgtacctggcgctgaatctccttcgtttcatccggatttgt

SEQ ID NO: 686 - DNA, 3857 bp, Zea mays
  source: /note="Zea mays BAC clone full insert sequence contig bacb.pk155.h15.fis23"
cgacggcgatgaaaaaaccgctttgtatcctttctccttcgcccctttttgtttctgttttttttacgtaaccgaaggagaaaaacaaggaagcgacgttgactcggtttgtttttttttctgttttttttgacgtaaccgaaggagaaaaataaggaagcggcgttgactcggtttgtggcgttgactcggtttgatgtaaccgaaggagagaaacaaggaagatggttgcggcgcgctagggaaaatgtaaccgaaggagaaaaacaaggaagatggttgcggcgcgctagggtttgatgtaaccgaaggagaagaacaaggaagaaagaaggatggtgagaaaaaacactatgcgaccagcaacaaatgacgcgaaagcacacaaattcaacaatgcagattattgaaagaaggtgcgaggctcaaaagggtgctggtataaggtctaccctgaatttttatgtggttttgtggactgtaggagaaaaaaacactcgataaactcaccgatcaacctggaaatctgataccacttgatagagctggggtgcccgatctttcggtgagtggagataattccgatttggtggaagtagaccctcacgatccgactacgacgagcgatcccgaagcgccaatgcaatcgctgaaccaacttccaatggttaccgaccttgctgatgcgagatcggcctgatcacgaagatcgtttcctgtgcgcaatcgaagaacgaacaagaaaaagatgcgaacaatcttaatatcactcgaggtggagttctgaatcacagaggacagcacgtatttgtgcgtgttctggggtagcaaaagctagatgtaaaacaaaacttgaagaacaaaggaggcgcagctcctatataaatagagagagggggcatagcccctaggggcggccaaccctaggtcgtccactatgggccgcagttgggttggtcgtctattcttctgggccctcattcttcagtagcatgacgaagttaagatctctggcacgggcccgagtgattggcccagctaatgaaggaagtggcgcttgatgtggaggtgctgctggtgtagtcgtactcatagtgatgtcctcatcactcgcaattttgttgccgcacgtcacccattccaaaaactggtgtcggggtgcatacaaagcacgagtttttgccaccggaactatttcttcatttgtcgcaataaacatgtccaatccacaactttaggtccaaacctcatgtttgggatggtttcgcgcaatttcgttgccgcacgtcacccattccgaaaacgggtgtcggggtgcatacaaagcacgagtttttgccacaggaacaatttcttcgtttttcgcaacgaacatgccaaatccagtatattaggtccaaatcttatatttggggtggtttcgcgcaatttcgttgccgcacgtcacccattccaaaaatgggtgtcgggtgcatacaaagcacgagtttttgcaccggaaccatttctttgtttttcgcaacgatcatgcccaatccacaactttaggtccaaaactcatgtttggggtggttttgcgcaatttcgttgccgcacgttaccctttccaaaaagggtgtcgatgtgcatacaaagcacgagtttttgccaccgtaaccatttcttcgtttttcgcaacgaacatgcccaatccacaactttaggttcaaaactatcgtttggggtggtatctcgcaatttggttgccgcacgttacccattccaaaaactggtgtcatggtgcatacaaagcatgagtttttgccaccagaactatttcttcgtttttcgcaacgaacatgtccaatccacaacttgaggtccaaactcatgtttgggatggttcacgcaattttgttgctgcatgtcacccattcagaaaacgggtgtaggggtgcatacaaagcacgagttttggccaccggaaccatttcttcgtttttcgcaactaacctgcccaatccactactttacgtccaaaactcatgtttggcgtggttttgcgcaattttgttgccgcacgtcacccattccaaaaacgggtgtcggggtgcatacaaagcacgagtttttgccaccagaactgttggggacttgttctcaaatgctaagagttaagaacaaggcaacataaaaagtgttaagtgttaaagtccttcgtccttcgaagcattatgtcccttctgatgaagacatccacactactgatgcatctataccaatacaagtaccaatttctggtcccattactcgcgctcgtgctcgtcaactcaaccatcaggtgattacactcttgagtttatgtccatcatatttagaccatggagacccgtgcactcttgttttgcttaggaatcagggagaagaccgaaagggaaaaggatttgaacatgctggattcggactgcagaagaacaccaacttgtgacggtcaccacggtcagatgcgggctcggattggaatgttcaagcacaacatggaaagcttatcaagtctactttcatatggatccggaattatagtcatatctgttctgaggccgccgtaatcattgttttcttatcgagacatttcctgccttttctgcccatggtgctgcgtcaccctattttggcccaatgggtcgtgtatcaagttaggtccattagggacgcatcctagggttgcagcacgaccccaatacccttgtggtcgtcctcccatgtttataaaccccctagccgccaccaagaacagcgggttttgtttagatcaagtttagctctcgctacttgcttgcaagcgcgcgtgctagttcagccgcccgtcttcttgtcttcggaaccccaccatattggagtttgatctttaaacctacatttagatctggtaattcagtacttgttctacttgttcttgctagttcttcgattgcttgcaggacgagtgccctagtggccagggtgtcacgctccacaagatcgtgacagccataggaggtggtgtatcggttgctaaggcgcagcgtctttggaaggctgtagtcgggccgtgaacgtcgtctcctcccccaatcgagttattccacaccctctcatcgaaagatcgggcaatcacccaacgggtgcacatcagttggtaatcagagcaaggtttatcggtgagagatttacttttcttcgctgttttcttatctcctatagtccagaaaaagccaaaaaatagtagattagttttaccgcaatcctataaaccattgagcatttactagtactacttagttagggcttgttgagtttttggttgcatcggttgtgtcgagttgctggtcttagtttattcctttagagttttgagttctaccacgttttggtcaccacgaaatccaccatcaccaaaaacatctctggttcgtttttgccaccacggatacatatcatatccgatttggaagtttaaatacaacctggaaagcttatcttatcttctttccaacggatctgaccttatctcaaaattcgttctgagggctccgcaatcatcgtagagatttctggacttcctatattaacaagatttgttaaatctgatttaaaggggttgttagcaatatctttattgtttgggttgtcatagtgaaaaaaaagggtttaggcccctgcaaaaaaaaaaaacagaagaagaagaaaaaaaagaatagaaaagaaaaaaaaaggaaaagaagaagaagggggctgaatctctaaatctgttgtttctctttgtgctgtgctagttgttctttttcagtgactcactagtgtgcctaggctcacgtctctagcctggtttcgacagt

SEQ ID NO: 687 - DNA, 5803 bp, Zea mays
  source: /note="Zea mays BAC clone full insert sequence contig bacb.pk155.h15.fis24"
ccgaaaattttcggaatgggtgacgtgaggcaacgaaattgcccgaaaccaccctaaatataagttttggacctaatatactggatttggcatgttcgttgcgaaaatcgaagaaatagaaggtggcaaaaactcgtgctttgtatgcacctcgacaccagttttcggtatgggtgacgtgcgacaacgaaattgcgcaaatccaccccaaaagttttggacctaatgtagtggattgggcatgttcgttgcgaaaaacaaagaaatggttctggtggaaaaaaactcatgctttatatgcatcctgacacccgtttttggaatgggtgacgtttggtaacgaaattgcgcaaaaccaccccccaaacttaagttttggagctaatgtagtggatttggcatgttcgttgcgaaaaacgaagaaacggttccggtggcaaaaactcgtgctttgtatgcaccccgacacccatgttcggaatgggtgacgtgcggcaacgaaattgtgcgaaaccaccccaaacatgagttttggatgtaaagtagtggattgggcaggttcgttacgaaaaacgaagaaatggttccggtggccaaaactcgtgctttgtatgcaccaacacccattttcggaatgggtgacgtgcggcaacgaaattgcgcgaaaccacccgaaacatgagttttggacctaaagtagtggattgggcatgttcgttacgaaaaatgaagaaatggttctggtggcaaaaactcgtgctttgtatgcaccccgacacccgttttcggaatgggtgacgtgcggcaacaaaattgcgcaaaaccacgccaaacatgagttttggacgtaaagtagtggattgggcaggttcgttgtgaaaaacgaagaaatggttccggtggccaaaactcgtgctttgtatgcacccctacacccgttttctgaatgggtgacatgtagcaacgaaattgcgtgaaccatcccaaacatgagtttggacctcaagttgtggattggacatgttcgttgcgaaaaacgaagaaatagttctggtggcaaaaactcgtgctttgtatgcaccatgacaccagtttttggaatgggtaacgtgcggcaaccaaattgcgagataccaccccaaacgatagttttgaacctaaagttgtggattgggcatgttcgttgcgaaaaacgaagaaatggttacggtggcaaaaactcgtgctttgtatgcacatcgacaccctttttggaaagggtaacgtgcggcaacgaaattgcgcaaaaccaccccaaacatgagttttggacctaaagttgtggattgggcatgatcgttgcgaaaaacaaagaaatggttccggtgccaaaactcgtgttttgtatgcacccgacacccatttttggaatgggtgacgtgcggcaacgaaattgcgcgaaaccaccccaaatataagatttggacctaatatactggatttggcatgttcgttgcgaaaaacgaagaaattgttcctgtggcaaaaactcgtccttgtatgcaccccgacacccgttttcggaatgggtgacgtgcggcaatgaaatcacgcgaaaccaccccaaacatgtgctttggacctaaagtggtggattgggcatgttcgttgcgaaaaacgaagaaatggttacggtggcaaaaactcgtgccttgtatgcacatcgacacccgttttcggaaagggtgacgtgcggcaacgaaattgcgcgaaaccaccgcaaacatgagttttggacctaaagttgtggattgggcatgttcgttgcgaaaaacgaagaaatggttccgatggccaaaacatatgctttgtatgcaccccaacacctgttttcggaatgggtgacgtgcgacaacgaaattgcgcgaaatcatcccaaaaaagagttttggacctaaagttgtggattggacatgttcgttgcaaaaaatgaagaaatggtttcaatggcaaaaactcgtgctttgtatgcaccccgacacccgttttcggaatgggtgacgtgcggcaacgaaattgcgcgaaaccaccctaaatataagttttggacctaatatactggatttggcatgttcgttgcgaaaatcgaagaaatagaaggtggcaaaaactcgtgccttgtatgcaccccgacaccagttttcggtatgggtgacgtgcgacaacgaaattgtgcaaatccaccccaaaagttttggacctaatgtagtggattgggcatgttcgttgcgaaaaacaaagaaatggttctggtggaaaaaaaactcatgctttatatgcatcccgacacccgttttcagaatgggtgacgtttggtaacgaaattgcgcaaaactaccccccaaacttaagttttggagctaatgtagtggatttggcatgttcgttacgaaaaacgaagaaacggttccggtggcaaaaactcgtgctttgtatgcaccccgacacccatgttcggaatgggtgacgtgcggcaacgaaattgtgcgaaaccaccccaaacatgagttttggatgtaaagtagtggattgggcaggttcgttacgaaaaacgaagaaatggttccggtggccaaaactcgtgctttgtatgcaccaacacccattttcggaatgggtgacgtgcggcaacgaaattgcgcgaaaccacccgaaacatgagttttggacctaaagtagtggattgggcatgttcgttacgaaaaatgaagaaatggttcttgttgggggctttcgtcctccgaaggtcctcaaaaacatgatttgacaatgttttccaagtggattatgtgaacaggtaccttcggactcagaattacgaacatgaagtgcggtcaggacgaagcctgaaccagacgaaggacgggctgattaccaagctccacgaaggatggtgcacagccgaagctgtgcgcagggaagcttcgtcgcgatagcagagaggggaaccgacttaaagatgaaaagactacgtgggccttgtcagatttccataagtcattgacaaatgtaatggacataaatgtaattttacgtgggctgcgtcccgcgtctataaatagatgaacagtactcccgtactgttcacgcgaacttggcatttgcttttgcgtcacgcttgtactttttatcttctctcaggaccgaaggtacatttgtaatttgaaatcatttctatttttccatgttaataaaatagaaatgattctatgatgatgcttatattatatttcatgctttatatgaatccttcgtcattacttgttatgtatacgaaggtatgtctcttatgaccttcgtccgaaactcattatttcccgaagggacataatgcttcgaaggacgaaggactttaacacttaacactttttatgttgccttgttcttaactcttagcatttgagaacaagtccccaacattggcgcccacctccggtgaactcacttccacttcgagttttttgaacaccttcggaagctatagaccctcgctatggcgccgaagaaagcttcagtgactggggctgcagcactgcaaccgctggaccccaaccaggagaccgtctctcttcgggaggcccgaaaccagaagaggaaggctgtcagcccgacgattcaggaggatgaactagaccaagagaccagggacatggagatgctacatcaacaggtgcagaggaagaaggagaagatggccaggctagctgagctgcagaggcagatagacgaagcttctgaagaagtccgtcatcttacccacgatgagcagaaccgaaggcctcaacaaaaagaccttcatcaggagggcttcttcaatgaagatgactggtatgacaatttccatcatggaaattttgttttcgacgatgcttctcctctgtccgctgatctgcaggctacaccttggcctccatcctataagccaccccagcttcccatgttcgatggccattcggacccgaagcagttcttgatgagttacgaagcaacagtgtcttcgtatggtggcaatgctgcagtaatggcaaagtctttcgttatggccgtcaggagtgttgctcagacctggtattcctcccttcggccaggaacgatcacttcatggcagaagctgaaggatatgttattgaccagctttcaaggatttcagacgaagccggtcactgctcaagccttgttccagtgcactcaggatcatgaagaataccttcaggcgtatgtcagaaggttcttgcgtttgagggcgcaggcaccaacggtgcccaatgaaattgtcatcgaagccatgatcaaggggcttcgtcctggacctgctgctcaatactttgctaggaagcctcctcagaccctggagaagctgctccaaaagatggacgagtacattcgtgctgacaatgactttcgccaaagaagggaggaggccttcagattttctgaaatgaccaggggcttcggaggaagatcctatccgaggcatgtcaggtccatccacaactctactcagaatgatgataaggggagtcagcagaacagaccgcagtgctcctcacaggcttcggggcaacaacaaactttcttccggccaccagctccaagaggcagaggcgccaggggcttcggcggaagattcggagatcaaccaaggaaactgttttgcttgttctgtggagaaagcaagggccataccaccaggacgtgcgatattacaatccagaagcaaaaggaaatagccgaagctgcatctcaacaagctcagccgaagcaggtcatgcatactgcttcgtatcatccaccttacatcccacaatacatagacaaccaccctgcagcttctgtagcttcggcaagtcaacctcaagcttcctggcagcagcctccgcctccacctccactgcaacagggtcaacagccagaagggagtcaatatgccccacaccaaagggacttcagagaacaatccgaagctcgcacagtcaacagcactgtgccagagtcgaagcacatttattgacacatatcctacctttgatagcagtcttttctattcagttttattttctgtgaaacaaagaacattgttagttttcatgtaataatttcgttgtttcccacgaggaaaacccattttcttcacaggcttaagtccctgaagcttaaaatttttttttgcgctaacaaggaggaccttcgaattattaaaaatccttcgaagcaacagaaagtcgttctaaggaacgcagagtaagttgatgaagtcacaaaaagccgttccaaagggagcgcagtgtaagttttctgctcaaaagtcgttcctacgggaatgcagagcttacagcgaaaagtcaacgctgataccgccaaagtaaaaggcgaagaagctcctaagggaggcttacagcgaaaagtcaacgctgataccgcctaagtaaaaggcgaagaagctcctaagggaggcttacagcgaaaagtcaacgctgataccgcctaagtaaaaggcgaagaaactccaaagacgttcctaagggaatgcagagtttacagagatattttgtgtgtatcttcggaacaaacgtcatttgcataacataacatcatcacaccattttgcatagcataagcatcatacatcatgttgcatatggcaaaagaaggggacaccgtatcaaccttcgaaaggacgctttgagaaagtgaaaattgtgtaaagtcatgaggaaatacaatgataatcttcggaatacagcttcggagaatgtttttacga

SEQ ID NO: 688 - DNA, 5561 bp, Zea mays
  source: /note="Zea mays BAC clone full insert sequence contig bacb.pk155.h15.fis25"
ctcgaaaccggccatccatgtatcgcttctaccttggcttgatcatcctcaattccctgtggagtcacaacataaccaagaaacgaaactcgatcggtgcaaaatgtgcacttctcaaggttaccaaataaacgtgcatctcgtaaagcattaaaaacagcacgcatgtgatcaacatgttcatccatagatttgctgtagatcaatatgtcatcaaagtatactaccacaaattttccaatgaaggcacgcaaaacctcgttcattaatctcatgaaagtgctaggtgcattagttaacccaaaaggcatgactaaccactcatacaatccgaacttagttttgaaagcagttttccattcatctcccaatttcatacgaatctggtggtacccactacgcaaatcaactttagaaaagacaatggcaccactcaattcatcaagcatatcatctaaacgtggaatagggtgtcgataacgtatcgtgatattattaatagccctacaatcaacacacatacgccatgttccatcttttttaggcactaaaataaccggaacagcacacggactaagagactcacgcacgtaacctttgtcgagtagttcttgcacttgtcgctgaatttcttttgtttcctctggatttgtcctatatggcgcacgattcggcaaagatgcaccaggaataagatcaatttggtgctcaatccctcgtataggtggcagcccctctggtatctcacttggaaatacatcagaatactcctgcaaaatgttagtaataacaggaggcaaagaatgctgcatatcttgaattgaaatcaaaacatccttgcataccaaggcgtaggcaacagtagtggaagcaaataattcattaacatcagtttttgttgcaagcaagcaatgtcctttcaattttatcccatctttgttattaccaacaactttaatattcttgttgttctcagttttagctttggtagctttagcaacatcatcacacacaatagcctcaggggacatgggaagcaaaataattttcttatcatggtgtatgagagaatattgatttgatctaccatgatgcatacaatctgaatcaaattgccatggtctacctagcagaatattacaagcatccataggcacaacatcacagtcaacaacatcacgatatgaaccaatagcaaaattaattcgtaccagcttggttaccttgaccttaccactattgttaagccattgaatgtgatatggatgcgggtgcggtttggtcgtaagtgcaagcttctccaccatgtcgctgctagccaagttgttgcagctacctccatcaatgatcaaacgacatgaacgctccttaatgacacactttgtttgaaacaacgtatgtcgctgattctgctctgccttctccatttgtgcactaagcacacgctgtacaatgaggctctcataatgctctgcatcatctgcaccaatctgttcttcgggtggttccttagtgcctgcatcatcagccgcaagcaaagcaagtgtagcttcatccaaatcactagcagaggaatacccaccatcgtcttttaccaccaaaacacgctgattaggacaatcacgctgcacgtgtccatagcccttgcatcgataacacagaacatctcttgttctacccgtggaggctactgaagaggcactacctgctggtttctgggcagatttggttgctgaatttgtggaagatgcacgtggtttgtcgccggaggaaggcgggggtgctggtcgacttggcgagggagttggtgctggtgtacggccggtcatggacgtagtcgtgcgctgttgccatggtgtagattttcctgcagaaacattagaccttgcactagcacgtcgtccctgcacttccctttcagctttgcaagcaagatgaaacaatcgggttacattagcataatctttataagcaaggatgtcctgaatttccctatttaacccgcccaaaaatctagccatagcagattcctcaccctcctctatgttacaacgcagcatacccatttgtaattcctgataatattcttctacacttttagtaccctgtctcaattgttgcaacttgtttaacatatcacgtgcataataagaaggaacaaatctagcccgcatgacccgtttcaacgcatcccaagtttgtggcatgttattaggattcttcttaccatgttctatccaccaaacagaagcaaattcagtaaactcactagtagcagctctaacccgcgcattctcaggaaattcatggcatgcaaacttttgatcaaccgcaatctcccaagtaatgtaagcatcagggtcatatttaccatcaaaaggaggtattttaaatttaaccttactaaaagcatcatcattaccatgtacctcacgtcggtgaaaaccacccatacctctacggttagtacgtagtcgccggcgattaggtgcttcttggtcatcttgttcagtatcagcaacatagtcatcccagttaccttcggcgccctcatcacgcccaccattgatattagcatgcatctcatcaaaccgcctcaagagtgcgacaaggctcttgtcaatatgagcaactgtcatttccacatttgcaagtttggtgttcgtgtcgatctgtgtggcctccaattgccccatcttttcattcgtcacctgcatgtcattatcaagaccttccgtgtgcgtcttcactagccttacaaagtgttgtatgatacccttggtgcgaggagagtgtggcatattacgagaagcatcatcaacctccaatcctgccatggttagacgaacagaggcaacaaaaaaaaaacgtgaaggaataaaaactctacaactattaggatgtagctactgcaaggcgctcactctcaacctgccacacaagctcttaccaattcttaccttgcacaacaggaggggtcagcaaccaacaagtctgcaaccgtggaataagtgtatcggtgccgcagcaacacgacctgtcaaactgtagtcgaaatatgtagagttgtaggtgggctgaagcaaggaatacactagtaccacgttagttacaaaagcaagctgaataatcgttcaacggtggtactgtgctggtcctaggctaaaccaggctagagacgtgagcctaggcacaaaggtagtcactgaaaaagaacaactagcacagcacaaagagaaacaacagatttagagattcagcccccttcttcttcttttccttttttttttcttttctattcttttttttttcttttctattcttttttttttcttcttctccatgttgtgcttgaacattccaatccgagcccgcatctgaccgtggtgaccgtcacaagttggtgttcttctgcagtccgaatccagcatgttcaaatccttttccctttcggtcttctccctgattcctaagcaaaacaagagtgcacgggtctccatggtctaaatatgatggacatgaactcaagagtgtaatcacctgatggttgagttgacgagcacgagcgcgagtaatgggaccagaaattggtacttgtattggtatagatgcatcagtagtgtggatgtcttcatcacatgtgttttggacctaaagtagtggattgggcatgttcgttgggaaaaactaagaaatggttccggtggcaaaaactcctgctttgtatgcaccccgacacccgttttcggaatgagtgacgtgcggcaacgaaattgcgcgaaaccaccccaaacatgagttttggacctaaagtagtggattggccatgttcattgcgaaaaacgatgaaatggttccggtggcaaaaactcgtgcttgtatgcaccccgacacccgttttcggaatgggggacgtgtggcaacgaaattgagcgaaaccaccccaaacatgagttttggagctaaagtagtggattgggcatgttcattgcgaaaaacgaagaaatggttccggtggcaaaaactcgtgtttgtatgcactccgacgcctgttttcggaatgggtgacgtgaggcaatgaaattgcgcgaaaccaccataaacatgtgttttggacctaaagtagtggattgggcatgttcgttgcgaaaaacgaagaaatggttccggtggcaaaaactcgtgcttgtatgcaccccgacacccgtcttcggaatgggtgacgtgcggcaacgaaattgcgcgaaaccaccccaaacatgtgttttggacctaaagtagtggattgggcatgttcgttgtgaaaaacgaagaaatggttccagtggcaaaaacttgtgctttgtttgcaccccgacacccatttttggaatgtgtgacgtgcggcaacgaaattgcgtgaaaccaccccaaacatgagttttggacctaaagtagtggattgggcatgcttgttgcgaaaaacgaagaaatggttccattggcaaaaactcgtgctttgtatgcaccccgacacccgttttcagaatgggtgacgtgcggcaataaaattgcgcgaaaccactccaaacatgtgttttggacctaaagtagtggattgggcatgttcgttgcgaaaaacgaagatatggtttctgtggcaaaaactcgtgcttgtaagcaccccgacacccattttcagaatgggtgacgtgcggcaacgaaattgtgcgaaaccaccccaaacatgtgttttggacctaaagtattggattgggcaagttctgatagagctggagtgcccgatctttcggtgagtggagataattccgatttggtggaagtagaccctcacgatccgactacgacgagcgatcccgaagcgccaatgcaatcgctgaaccaactcctaatggttaccgaccttgctgctacgagattggcctgatcacgaagatcgtttcctgtgcgcaatcgaagaacgaacaagaaaaagatgcgagcaatcttaatatcactcgaggtggagttctgaatcacagaggacagcacgtatttgtgcgtgttctagggtagctaaagctagatctaaaacaaaactcgaaaaataaaggaggcgcagctcctggataaatagagagggggcgcagcccctaggggcggccaaccctaggtcgtccattatgggccgcagttgggctggtcgtctattcttccgggccttcgttctttaacagcatgatgtagttcaattctcttgcacgggcccgagtcactggcccaggtggaaggggtggcgcctggactagggtagatggtgcctgggctggagaaggtgctgctggtgtagatgtgctcgtgttggtgttgatgtcctcatcatcctccccttcttgaactgaagtcgtcctcgacggcaactcctcatcttctcccgcatacggtttcaaatctgcaacattaaaactagtggaaacaccaaactccgcaggtaggtcaaggatataagcattatcattaatcttggttagtatcttaaaaggaccagcagcacgaggcatcaatttagaacggccttcagg

SEQ ID NO: 689 - DNA, 7414 bp, Zea mays
  source: /note="Zea mays BAC clone full insert sequence contig bacb.pk155.h15.fis26"
ccgaaggcacgaacaaatctgcggtagaaaccggcaagtccaagaaagctccgaatttgtgtgaccgtcgtcggtgtaggccactcccgaatggcagcaatcttgctgctatccacctcaatgccctgcggagtaaccacataaccaagaaacgagacacgttgcgtgcaaaatgtgcacttttccatgttaccaaacaagcgagcagcacgcaaagcgtcaaaaacagcacgcaaatgttctaaatgctcctctatagacttgctgtaaataaggatatcatcgaaataaacaacaacaaacaaacctatgaaggcccgtagaacttcgttcattaaacgcataaaggtgctgggagcattagtcaatccaaagggcataaccaaccattcatataaaccaaatttcgttttaaaagccgttttccattcatcaccgagtttcattctaatctgatggtaaccgctacgcaaatcaaccttagagaaaataacggcaccactaagctcatctagcatatcatcaaggcgtggaataggatatcgataacgaactgtgatgttattaatagcacgacaatctacgcacatacgccatgacccatctttctttggaacgagtaaaacaggaaccgagcaagggctaagagactcacgaatgtaacccttatcaagcagtgtctgcacctggcgctggatctccttcgtctcatctggatttgtacggtacggggcgcggttcggaagagaagcgccggggatgagatcgatttgatgctcaatgccacggaggggaggaagacccggtggtaagtccgtaggataaacatcagcatactcctgcaaaaggttaacaacagcagggggtatatccaaagacggtgcatcatcaagcggaacaagcattcgcgagcatacaagtgcataacagggcatatgagcttcatggagatcatcaaaatcagcacgtgtagcaagtaaaacaggagagtgcaacttgatttcagatttaataggtgcggctgatgttgatttgacttgttgtgcagttttagcagccctagtaagatcatctttcaaaatttggtcaggggtcattggatgtataattattttctggcctttaaacatgaaagaataatgatttgaacgaccatgatgtaaactatcagtatcatattgccaaggtcgacctaataacaaagagcatgcttccataggaataacatcgcaatcagcataatcagaataagtacccaacgaaaaggggacacgtaccgaacgtgttacctttattttaccaccatcattaagccattgaatgtgatacggatgtggatgtgtgcgagtgggcaaggataatttctctaccaacgctgtacttgccaaattgttgcagctgccactatcgatgatgatgcgaatcgaccgttcgtgcacgacgcccttggtatggaatagagtgtgtcgctgatttttttcggcctgggcaacctgtgtgctgagaacacgctgcacaacaagactctcatacctatcggcgtcgataggatcaacgtggacttcctcattttctgcatggttagtggcaatcatagcatgactagtttcctcagaatcactggctgaagagtactcaccattgtcacgtataagcaaggtacgcttgtttgggcagtcccgaatcatgtgcccaaaccctctgcaacgatggcactgaatatcccgtgtacgtcctgtggaagaagcggcgcctttggcagggggcgccactggcttggccggccctgtgcgcgatgtagtgctaggcgtaggaggtgcagggctggaaggagttgagctgtgtgttggaccccggcctgcaaaagagttagtatatgtctttgatcgtcgtccctgcacttcacgttcagctttgcaagcatattcaaacaatgtggttatatcaaaataatccttataatcaagtatatcctgaatttccctgttcaaaccaccacgaaaacgcgccatagcagcgtcatctgactcaaccaaaccacaacgaagcatacccttttgcaactcctggtaatattcctcaacagattgtgaaccttgttgaaaacgctgcattttgttaagcaaatcacgagcataataggaaggaacaaatctgtggcgcatggcagtttttaattgggtccaagtaatgacactgttaatgggaagtttttgtttatactcacgccaccaaattaaagcaaaatcagtaaattcactaatggcagccttcacttggctattagcaggaatatcatggcatgaaaatttctgttctacctctaattcccaatcaagatatgcagcaggatcatatttaccattaaaagatggaattttaaatttaatcttagaaaataagtcattagggggatgacgaaccacacgacgtgcacgaccacggcgatctccatcgtcctgctcagtgtcaccgccgtattcctgctccatctttgtggtcaatgcatcaaggcgtgccaggatggtgtcgagtgtggtgcgagtcgccgtttgagcaaggtcaagttggttgaaacgctcggtcgtcgaagtgatcgttgaatcaagccgttcatgcatcgtcctaatgtcagcagcaagtccatcaacttgtccccttacttcctgcaactgggcatccaccatgtcgtgtgctcctgccatagttagcgcaaacaccaaaaggagaaaaaccaacgacaaaaacaggggtgtactgctcacaaggcgctcacactagtgctgttatcaagttcttatccgttcttaccaagccacagtggtgaactgcaaccaacaggtggaaccggtgaaagattggatgagcgattgcgtggagaaacagaaacctgctcgtcgtagaaatatgtggagttgtgggtaggctgcactcaagtcaaggattagcacgatcaaacaataatgcaaagttgaattatagtgcaaaacacgaaactatattgctggccacaggtgcaaaggatggatggatggaaatagcagaatggcagtaacgtaaatattgtactagtgatgccaaaaaggcactagtagaaatcacaggtgattttgtttttcttttttgtatgatttttttgatatttttctcagcacaagaagcaacaagataggagctacacgaagtttcacctaaaacagatatcagatgtggtctacagaaaatcaggaagttctctgaaaagcgtgcgagaactttgacgaatttttttctttattttcctgaatttttttgacaattttgtcgaaccccaaacagaccgtaggttagtttggccggcctcagaatggtgtcaactagctcctgtaaaaatttcagattttttggacacccgagcgaaaagttatgcccgatttacggaaggtacctcaagttatgttttaaaaacgactgggatgaaataacgtatcttctcttcgttctctttttttgtttctgttttttttatgtaaccgaaggagaaaaacaaggaagcggtcgttgactcggtttgttttttttctgttttttttcgtaaccgaaggagaaaatcaaggaaacggccgttgactcggtttgttttttctgttttctttttgatgtaaccgaaggagaaaaacaaggagacaatgttgactcgatttgtggcgtgatcaaacgggagatggtggcggcactagggtttgaatggtggaagaacacaatgcaaccagcaacaaatgacgcgaaagcacacaaattcaacaatgcagattattgaaagaaagtgcgaggctcaaaaggtgctgggataagatctaacctgaatttttatgtggttttgtggactgtaggaaaaaaacgctcgataaactcaccgatcaacctggaaatctgataccaattgatgtagctgaggtgcccgatctttcggcgagtagagataattccgatttggctgaagatgacccttgcgatccgactacgacgagcaagcccgaggcgccaatgcaatcgctgaaccaactccctgtggttaccgaccttgctgatgcgagatcggcctgatcacgaagatcgtttcctgtgcgcaatcgaagaacgaacaagaacaagatgcgagcagtctaatctattactcgagggtggagttctgaatacacgaagacagcgcagatttgcgcgtgttcgagagtagctaaggctaacgtaaaacaaaactcggaaaataaaggaggcgcagctcctgaataaatagagagggggcgcagcccctaggggcggccaaccctaggtcgtccattatgggccgcaattgggctggtcgtctattcttccgggccttcgttctttaacaacatgatgtagttcaattctcttgcacgggcccgagtcactggcccaggtggaaggggtggcgcctgggctggagaaggtgctgctggtgtagatgtgctcgcgttggtgttgatgtccgcatcacaaagcatatgttttggccatccgaaccatttcttcgtttttcgcaacgaacatgcccaatccacaactttaggtccaaaactcatgtttgcggtggtttcgcgcaatttcgttgccgcacgtcaccctttccgaaaacgggtgtcgatgtgcatacaaggcacgagtttttgccaccgtaaccatttcttcgtttttcgcaacgaacatgcccaatccaccactttaggtccaaagcacatgtttggggtggtttcgcgtgatttcattgccgcacgtcacccattccgaaaacgggtgtcggggtgcatacaagcacgagtttttgccacaggaacaatttcttcgtttttcgcaacgaacatgccaaatccagtatattaggtccaaatcttatatttggggtggttttgcgcaatttcgttgccgcacgtcacccattccaaaaatgggtgtcgggtgcatacaaagcacgagttttggcaccggaaccatttctttgtttttcgcaacgatcatgcccaatccacaactttaggtccaaaactcatgtttggggtggttttgcgcaatttcgttgccgcacgttaccctttccaaaaagggtgtcgatgtgcatacaaagcacgagtttttgccaccgtaaccatttcttcgtttttcgcaacgaacatgcccaatccacaactttaggttcaaaactatcgtttggggtggtatctcgcaatttggttgccgcacgttacccattccaaaaactggtgtcatggtgcatacaaagcacgagtttttgccaccagaactatttcttcgtttttcgcaacgaacatgtccaatccacaacttgaggtccaaactcatgtttgggatggttcacgcaatttcgttgctgcatgtcacccattcagaaaacgggtgtaggggtgcatacaaagcacgagttttggccaccggaaccatttcttcgtttttcgcaacgaacctgcccaatccactactttacgtccaaaactcatgtttggcgtggttttgcgcaattttgttgccgcacgtcacccattccgaaaacgggtgtcggggtgcatacaaagcacgagtttttgccaccagaaccatttcttcatttttcgtaacgaacatgcccaatccactactttaggtccaaaactcatgtttcgggtggtttcgcgcaatttcgttgccgcacgtcacccattccgaaaatgggtgttggtgcatacaaagcacgagttttggccaccggaaccatttcttcgtttttcgtaacgaacctgcccaatccactactttacatccaaaactcatgtttggggtggtttcgcacaatttcgttgccgcacgtcacccattccgaacatgggtgtcggggtgcatacaaagcacgagtttttgccaccggaaccgtttcttcgtttttcgcaacgaacatgccaaatccactacattagctccaaaacttaagtttggggggtggtttttgatgaagctgaggtgcccgatctttcggcgagtagagataattccgatttggcggaagatgacccttgcgatccgactacgacgagcaagcccgaggcgccaatgcaatcgctgaaccaactccctgtggttaccgaccttgctgatgcgagatcggcctgatcacgaagatcgtttcctgggcgcaatcgaagaacgaacaagaacaagatgcgagcaatctaatctattactcgagggtggagttctgaatacacgaagacagcgcagatttgcgcgtgttcgagagtagctaaggctaacgtaaaacaaaactcaggaaataaaggaggcgcagctcctgaataaatagagagggggcgcagcccctagggggcggccaaccctaggtcgtccattatgggccgcaattgggctggtcgtctattcttccgggccttcgttctttaacaacatgatgtagttcaattctcttgcacgggcccgagtcactggcccaggtggaaggggtggcgcctgggctggagaaggtgctgctggtgtagatgtgctcgtgttggtgttgatgtccgcatcatcctccccttcttgaactgaagtcgtcctcgacggcaactcctcatcttctcccacatacggtttcaaatctgcaacattaaaactagtggaaacaccaaactccgcaggtaggtcgagggtataagcattatcattaatcttggttagtatcttaaaaggaccagcagcacgaggcatcaatttagaacggcgcaaagtaggaaaacgatcctttctcaaatgcaaccaaaccatatcaccaggttcaaaagtaacatgttttcttcctttactaccagcaacctgattttttgtattagtagcagcaatgttctgtttcgtttgttcatgtatggtaatcatttgttcaacatgtgcagaagcatctacatgtggggcgttcgcagcattaagtgaaatcaaatcaataggtgccctaggaatgtaaccataaacaatctggaaagggcacatctttgtagaagaatgcgtggcatgattgtaagcaaattcaacatgaggcaagcaatcctcccaacgtctcaaattcttgtctaaaacagccctaagcatggtagataaagttctatttactacctcagtttgtccatcagtctgagggtgacaagtagtgctaaacaacaatttagttcccaatttattccaaagagatctccaaaaatggcttagaaacttagcatcgcgatcagagactattgtttttggaataccatgtaaacgaataatttctctaaagaacaattcagcaacaatgctagcatcatcagttttatgacaaggtataaagtgagccattttagagaatctatcaacaaccacaaaaaatactatcctt

SEQ ID NO: 690 - DNA, 4394 bp, Zea mays
  source: /note="Zea mays BAC clone full insert sequence contig bacb.pk155.h15.fis27"
gggaacctgtataaattatgccacaagcaaggctgagtatactaatactcagctagacttacccggtgtgaggagtctactcctctacctctagacatgcagctgtttggctgtggggtttggttgccaaaagcactagctgagtttctaaatcaagattttaacttaatcaaagttaagtgtgactctcttaaggctaaaagtggactatctactcatacatggtagcaagcatcattaacagtcaacatcttatctcaactcatcatacttccacttattactcaatgcagtacaatggatcaagcagtctcattagctgcgagaagcagacgattcgaatcgagtttttatccttgcaaggtaaacctaaacacacgacatgtaggggcactccgtccccacacacatcaaccgtccccatcgattccctggcaacagatcaaggctcaccgccttggcgtacaatgccccactgaccccgactggccgacgtgcagtgaccgcacttgtacccaccataaccggaatgggagacctcgtctcaggtcgcgtgaggggatatgtctgcgggcaggttcactcaggtactaggcttaccgatttaccatatttctcggtatgtgtttagtacattcaaacgcttgacacaggtatccgcacgttaatccttattccattttccatctcgtaaacaaccaatccccatggattgttgtccaccaactagtatcatgatagtgtgaaagtgggtacaatcaatttcctgatctcgcgcgagtgctagaaaaatcactcgtcttctaccaagatcctatttaattaaagcaactactcgacctgtcatactagtattcatttcaaaaggattcctgagatcatgcaactagggtttcaaacaattcctacacctaagtgcacaatcaatcctacaatcattaagtgaagtaaaatagcataaataacaggttatgcataaaaccggggcttgccttccaaagcagtggcaggcaggtcctctggtgctggctctggtgctggatctggggcaacctcctgggcagctccttgctccggcacgaggatgtactctccgtccgcaagattacagtctatcaaaatgcaatgaacatgtatgtcatgattatgcaagatttaagaacattaagttaaagaaactaagttaagaattaacttagggtttcctggttctgtggggcttctagtggtatacatagactttgacttattaccctttaagcttaggtttggctttaggataacatagtagaatttgtattgtcttgatacactctagtggacagagtacaaggttttggaaatcattatttcacatttttcattttcctttatttaattttccatttagggtttctaaggtaggtttgaactacatcatggttttaataatttctaaaaattctgtaaaaattatagtgggttgtcactggctattttagcttgttttaagaatttgaggcttaaggtataaaagttaggccttaaacaaaaataacaaaagttaggcaaaaaggggcactttacactacacctcctagttaggggtaggctctgtcctaaaggttatttttgttgacatcctctggtaataataggtctttgtgctaaaaaccacaggaaactaaggggtggttaattagctatgattttcccaagtttaatgtcaaaaaggcactttctacttccttattatttgaaaaatgtcaaacagcagatttcatatttttcttaggttctttctaataaaacaatagtgatcccaagggtgggggtgttttcaccttggggttatttttgtggagtttttctaatttatccttgttttattaatttaaaagagatcttaattattttacactaaaacagggtatgatatatttttctagtgaactacattaactaagtatcttaacaaaaataggggtgccctctggttcaatatttgtgtcacttttcctatttttcttaaacttaagcatatttggaataaggggttaaaactaacttaatgtaatggatagaggggtttaacatttttaaacaggttagtaggtgaatataaacttctccaaattttcctaaccttagtcaaatagcctaactatttttcttactattatttagcttttggccaaagttaacattaaatcagaacttttaagttttccaccgtaccaaggggttttatatttttcctaaataggttacatgatttagagtctggcaaaattggtttgaccaaaattggataaaccaaacagaagttatgggtttttaaagtttctgtttgaatttaaattaggttttaattaagttttcctggaaaaacagtttgcgccgaggtccctgggtttaaaacaattcaaacctcgcagatctacccttaaggcactattcacttgagtctctgacctttcacttaaccccctgggtttctctccctctcacccgcagtccctccctcaactgaaacagtagccgcgggaaagaaaagggtggcgcggcttaccggcggcgagggaggtccggcgaagggtaggattggctcggagggtctggcgatcacgtcgaggtacggctcgtcgtcggggatggccggaatcgcccggtccacgtgagcaggcgggcgagctcgtcggcggcgcgtgctccggcctatccacagcggcatagttcaatccaagggcatagggagcttcgtggaggtctaaggagtctaaccgtgcaaggaatcgaagagaggcgcacggtgtacctcggtccacagttgccggcggtcggttgaagtccggtgaccttgggccggcctctccgttgaagcagagcccgattcctcgctcggggagcttcacggagacgtgcacagtcttctccgggggctggacggggttgggaatggctgggctggccggtctacggtggcaggggctcgggtggccgcgggcacgtcgcgtatgggcaaacggcggcgaactgagctccggtgaggcttgagcgcgtgcggaggggtacggccaaggctcctgggcgttttatagtcgcggacgcggaccagggcactggcttggcttgggcgcggcgcgggcgcgcgcgcgggcgtgctctggcgcggcagacggcgtcgaacacgtggcggtttgtttcttccagtgttcaaatgtcgccagaggtcgcaaacgtgcgaatctttgcaaaagtccggcgcagacctcttcctggcacctagggctgtcactcaactgtgagacgccggggcagatacggcctagggagggagatcttcgggtgccaaaacaggtgtgtcatactgagcatatcacgacaaaagccatgccatggcatgtcaaacgtccgagtctcgagctcaactttttccagtgggtgccctaagtggtattgcacatttttggtatagaacccaagtggttttggtgccatttttaaagtgaacacggttgatctttgatttagggctaaaatgggacttagagggaattagagagctctagctctctctccacttggagatttgaaatggggtttccctaggggcctttttgtaatatttccctcccctaattgatggttataatgttgcttagggtttgggtaaaaattacccatgttttgcacatttgctcactctctttcccctcttatccatggttttgggagatagggtttaagagaggcctagggttctttccccctctcccaaggtgatagttgcacacaattagggtaatgcctttggtcattcccaactcttggtaaaaacttagtttccaaagccccttatacttttgctccttaagttcttccacatgtgatcatagtcttgagtgccaaggtgtgctccagccatggcaacacctggggtgttacagccctccccccttaaaggaatctcgtcccgagatttgaggtagagtcccttggagggtgctggaaggtgtgttggtgctactctttctttatactcaagtttctcttgttaactgctcttcgaatgtcattctctttgcaacttcagaaggaagcccttcttaagttgaattcccaacttagactattcttgctatcttagtttcccttataattgatttcaaagggcaggtgggggggttctgtggttacataccgactcttttgggtagaaagtcggggaagcgagagcgtagaaaatcctcagtctcccatgtagcttcttctgttgaatggtgactccactgaaccttatacattcttactgtccttgcccgagttgatctatccttttgatctaataccttgacggggtactcttggtaggataaatctggttctatctcaatgtctaggagccgggagta

SEQ ID NO: 691 - DNA, 6255 bp, Zea mays
  source: /note="Zea mays BAC clone full insert sequence contig bacb.pk155.h15.fis28"
ccgaatcctgattttgctttaatttggtggcgtgagtataaataaaaacttcccattaacagtgtcattacttggacccaattaaaaactgccatgcgccacagatttgttccttcctattatgctcgtgatttgcttaacaaaatgcagcgttttcaacaaggttcacagtctgttgaggaatattaccaggagttacaaaagggtatgcttcgttgtggtttggttgagtcggatgacgctgctatggcgcgttttcgtggtggtttgaacagggaaattcaggatatacttgattataaggattattttgatataaccacattgtttgaatatgcttgcaaagctgaacgtgaagtgcagggacgacgatcaaagacatatactaactcttttgcaggccggggtccaacacacagctcaactccttccagccctgtaccttctacgcctagcactacatcgcgcacagggacgaccaagccagtggcaccccctgccaaaggcgccgcttcttccacaggacgtacatgggatattcagtgccatcgttgcagagggtttgggcatatgattcgggactgcccaaacaagcgtaccttgcttatacgtgacaatggtgagtactcttcagctagtgattctgaggaaactagtcatgctatgattgccactaaccatgcagcaaatgaggaagtccacgttgatcccatcgacgccgataggtatgagagtcttgttgtgcagcgtgttctcagcacacaggttgcccaggccgaaaaaaatcagcgacacactctattccataccagagacgtcgtgcacgaacggtcgattcgcatcatcatcgatagtggcagctgcaacaatttggcaagtacagcgttggtagagaaattatccttgcccactcgcacacatccacatccgtatcacattcaatggcttaatgatggtggtaaaataaaggtaacacgttcggtacgtgtccccttttcgctgggttcttattctgattatgctgattgcgatgttattcctatggaagcatgctctttgttattgggtcgaccttggcaatatgatactgatagtttacatcatggtcgttcaaatcattattctttcatgtttaaaggccagaaaataattatacatccaatgacccctgaccaaattttgaaagatgatcttactagggctgctaaaactgcacaacaagtcaaatcgacatcagccgcacctactaaatctgaaatcaagttgcactctcatgttttacttgctacacgtgctgattttgatgatctccatgaagctcatatgccctgttatgcacttgtatgctcgcgcatgcttgttccgcttgatgatgcaccgtctttggatataccccctgctgttgttaaccttttgcaggagtatgctgatgtttatcctacggacttaccaccgggtcttcctcccctccgtggcattgagcatcagatcgatctcatccccagcgcttctcttccgaaccgcgccccgtaccgtacaaatccagaggagacgaaggagatccagcgccaggtgcagacgctgcttgataagggttacattcgtgagtctcttagcccttgctcggttcctgttttactcgttccaaagaaagatgggtcatggcgtatgtgcgtagattgtcgtgctattaataacatcacagttcgttatcgatatcctattccacgccttgatgatatgttagatgagcttagtggtgccgttattttctctaaggttgatttgcgtagcggttaccatcagattagaatgaaactcggtgatgaatggaaaacggcttttaaaacgaaatttggtttatatgaatggttggttatgccatttggattgactaatgctcccagcacctttatgcgtttaatgaacgaagttctacgggccttcataggtttgtttgttgttgtttatttcgatgatatccttatttacagcaagtctatagaggagcatttagaacatttgctcgcttgtttggtaacatggaaaagtgcacattttgcacgcaacgtgtctcgtttcttggttatgtggttactccacagggcattgaggtggatagcagcaagattgctgccattcgagagtggcctacaccgacgacggtcacacaaattcggagctttcttggacttgccggtttctaccgcagatttgttcgtgattttagctccattgcagcgcctctacatgagcttacaaagaaagatgtgccgtttgcttggagtgattcgcaggaggtagcgttcaccactttgaaagataagttaacccaagctcccctcttgcaattgcctgattttaataaagtttttgagcttgaatgcgatgctagcggtattgggctaggtgctgttttgttacaagaaggaaaaccagttgcttattttagtgaaaaattaagcggtgctagtctgaaatattctacttatgataaggagctttacgctttagtgcgcactttgcatacatggcagcactatctttggcatcgtgagttcataattcattctgatcatgaggctttaaaacatattcgtacccaaacaaatctgaaccgtcgtcatgctaaatgggtcgaattcattgagtcctttccttacattattaaacacaagaacgggaaggacaatgttattgctgatgctttgtctcgtcgctataccatgctgtcacaattagattttaaaatctttggtttggacactgtgaaggatcaatatgttgacgatgctgattttaaagatgctttcggccattgtattaatgggataccatggggcaaatttcacatacaggatgggttcctgtttcgcgctaacaagctgtgtgttccagctagttcggttcgtcttttgttgttacaggaggcgcatggaggcggtctcatggggcattttggcgtctacaaaacgcatgaggtgttggctgcccacttcttttggcctcggatgcgcgctgatgttgagcgccttgttgcacgctgcactacttgtcagaaagctaagtcacggttgaacaaccatggtttgtatatgcctttgcctgtcccttcttctccttggcttgatatctctatggactttgttttgggcttgcctagaactaagaaggggagggatagtatttttgtggttgttgatagattctctaaaatggctcactttataccttgtcataaaactgatgatgctagcattgttgttgaattgttctttagagaaattattcgtttacatggtattccaaaaacaatagtctctgatcgcgatgctaagtttctaagccatttttggagatctctttggaataaattgggaactaaattgttgtttagcactacttgtcaccctcagactgatggacaaactgaggtagtaaatagaactttatctaccatgcttagggctgttttagacaagaatttgagacgttgggaggattgcttgcctcatgttgaatttgcttacaatcatgccacgcattcttctacaaagatgtgccctttccagattgtttatggttacatccctagggcacctattgatttgatttcgcttaatgctgcaaacgccccacatgtagatgctgctgcacatgttgaacaaatgattaccatacatgaacaaacgaaacagaacattgctgctactaatgcaaaaaatcaggttgctggtagtaaaggaagaaaacatgttacttttgagccaggtgatatggtttggttgcacttgagaaaggatcggtttcctactttgcgccgttctaaattaatgcctcgtgctgctggtccttttaaggtgctaacaaagattaatgataatgcttatatccttgacctgcctgcagaatttggtgtttccactagttttaatgttgcagatttgaaaccatatatggccgaggatgaggagttgtcgtcgaggacgacttcacttcaagaaggggaggatgatgagcacatcactatgagtacgactacaccagcagcacctccacatcaagcgccacttccttcattagctgggccaatcactcgggcccgtgccagagatcttaacttcgtcatgctactgaagaatgagggcccagaaaaatagacgaccagcccaactgcggcccatagtggacgacctagggttggccgcccctaggggctgcgccccctctatttatccaggagctgcgcctcctttattctcgagttttgttttacgttagccttagctactctcgaacgcgcgcaaatctgcgctgtcttcgtgtattcagaactccaccctcgagtaatagattagattgctcgcatctttttcttgttcgttcttcgattgcgcacaggaaacgatcttcgtgatcaggccgatctcgcatcagcaaggtcggtaaccacagggagttggttcagcgattgcattggcgcctcgggcttgctcgtcgtagtcggatcgcaagggtcatcatccgccaaatcggaattatctctactcgccgaaagatcgggcacctcagcttcatcaagcttccacatcacccaacctaggacgcagaccggccacgtcaacaggaggcgccatcatcaccctaccccgagctgactcgggccgcagggaacaagaccggcgtcccatctggctcgctccgccagacaggcaatgatggcgtcccgcatactctgtgacgacggcggctctcagcccccttacggaagcaagaggacgtcagcaaggactcaatcgctccgacagttgtccctccgccaggctccatcgctcctccgacggccacgacatcacaccagctgggtgccaaaatctctccggctgccacaacggcgtgtacttagggcgctagctctcctccgctagacatgtagcactctgctacacccccattgtacacctggatcctctccttacgcctataaaaggaaggaccagggccctcttagagggggttggccgcgcggggacgaggacgagacaggcgctcgcttgaagccgctcgctccctctcccgcgtggacgcttgtaaccccctactgcaagcgcacccgacctgggcgcgggacgaacacggaggccgcgggattcccagctctctcacgccggtctccggccgcctcgatctccccccttcgcgctcgccctcgcgctcgacccatctgggctggggcacgcggcgacattcactcgtctgcccagggaccctccggtctcgaaacgccgacaatttgttatcatgtatgatcgactatgcattgtggttgctaattaatttaaaatctctctagttatctatgtgtgctattaaaattcatttaaattgtatttgcatattttgttaaaaattaaatattaattcatttaaattgtatttgcatatttctgttaaaaattaaaatattaattcatttaaattttattttcatatttctgttaaaaattaaaatattaatatggtaatcaaatcacaatcacagacggtttttcattagggtccgtttgtgaaaagaatagagcaccacaggcggtcctaaaaaaaccgcttgtgatactaatacatcacatgcggttcgaatagcctgcgatatcctagacggttttctaatcgaaccgcctgtgatgtaaaaagcctaccgcttgtatagagccaaattgtactagtgtttagactgaggtccatcagcggacgagcacaaccgacctatggcctcaggactctggggccctttggaatgctggatttttttccaatttcctatgcttttcttgtgaaaattaattgattcatgtaaaatttctgtattatttctctgaaattcctatgttccaaaggatctcttagacggcagccgactacatgtggaaggacattggctcgttatttgtgattgtcgtgaagacgaatgaagacattggacataggacatggcagttttaagggcttgtttggatgtactaaaattgctagtgtagttagttgacgaactagtaggtggctaactaataactaatagttagttggacgcttagctagggtgtttaaatgcctccacctaaaagcatctaataactaaaatgttacatagattgtttagatgtctctaactaattttagcagctaactattacctctaatgcatttaaatacgatctaaatatgatggcaaatttagatagacttatacctcgg

SEQ ID NO: 692 - DNA, 7238 bp, Zea mays
  source: /note="Zea mays BAC clone full insert sequence contig bacb.pk155.h15.fis29"
gaagcagctggctcaacgtcagccaccaccccagcattatggtggtggagaccaccagcgtcaccccgcggtggccactatcaggaattcctcagcacccagcctccactgttcacaagggcggaagacccacttgacgcagatgtatggctgcgagtggtggaatccaaattcccactgctccatggagtttgctcagaggtcaccaaagtcaggttcgccacccagcagcttcgcggacctgcaaggacttggtgggatcattttcttgctatgcagccagaggaccgagaggtggagtggagggagtttaaggcagcttttagaggacaccatataccagccgggatcatggacaggaaactcaatgagttcttggcactcactcagggcaacaggacagtgttgcagtatgcccaggcctttaatgacttgtgccagtatgcgggatatcatgcggatacagatgagaagaagagggacagattcagaagggggctcagcactaagctccgggatcgtctcaacgccgtcagggccaacagctacaatgagttagtcaacatggccatctcccaagaggactgcattaccactaggcaggcagagaagaaaaggaagacccctgtggcaggaccctcagctcagccacagcgtttccggattgtgtccgacccccagggaaggggaccccagcagcagcaagggcgatgggtaattcgacctcagcagcagcagcagcaggcacccaaccgcaatcaatttccagcacagcggaatagtcagcagcagcagtaccgccaagccaatgacaacaggtgcttcacttgtggcaacactgggcattatgccaagaattgccccaggaaccagcagaggcaggggcagaatgcaaatcagaaccaaggcaagaggcagaaggtgcaagtgaggcagggcaggctgaacttcaccaccatggctgacattccagagggagcacccgtcatgactggtatctttacagtattaaattttcctgctattgttctttttgattccggtgcttcgcatagttttatcagtgcaaggtttagtgccaagtgccagttgccctttcaccacaccaatgggggcattacaatttcgaccccaggaggcagggttgccacctaccaaattaacaagaatgtgcctataaagtttggtagtctgataattaaagccaaccttctcattctgggtttggagagtgtggatattatattgggaactgactggttgacaaggaatcaggctgtgatggatattgcggctagagccattgaggtgcactcaccaacttgtggtgagaccacactgtatttgcctgaccagggatacacccgttcttgtgcctttgttatgatagaatccccagtggaaaagatcccagtggtctgtgactatccagatgtttttccggatgaattgccacgaatgccacctgaccgagacattgagttcgcaattgagttgcaacccgggactgctccgatctccaagagaccctatcggatgcctcccgcggaattggcagaattgaagaagcaactgcaagagttgttggacaagggatttattcgtccaagcacttcaccatggggatgtccagcattatttgtgaagaaaaaggatgagagtttgaggatgtgtgtggactaccgccctctcaatgcggtgaccataaagaacaaatacccgttgcctcgcattgatgttctgtttgatcagttggttggagccaaggtattctccaagatagaccttcgctcaagataccatcagatcaagatccgcgctagtgatattcccaagacggctttctctaccagatatggactgtatgagtttctggtgatgtcttttgggctgaccaatgccccggcttattttatgtatttgatgaactcagtattcatgccagagttagacaagttcgtggtcgttttcattgatgatatactggtttattccaagaacgaagccgagcacactaaacacttgcatactgtacttcagagactgcgtgatcatcagctgtatgctaagctgagtaagtgtgagttttggctgaaggagatcaaattcttgggtcataccatttctcaggatggggtatcagttgatcctgagaaggtgcaagaagtgatggattggaaacccccgaccacagtaaagcaaattcggagttttctgggattggcagggtactatcgacgatttattccggatttctccagaattgccaaaccaatgactgaactgttaaagaagggagtcaaatttgagtggagccaaaagtgtgaaggtgcattccataccttgaggcagcatttgacaacagccccagtgctggctcaacctgacaataccaagccatttgaagtttattgtgatgcttctggtactggtttgggatgtgtcttgatgcaaaagagcagagtgattgcttatgcttcccgggcactcaggccccatgagcagaactaccctacacatgatctagagttggcagctgtagttcatgctcttaagatttggagacactacctgatgggagctcactgtaacatctacactgatcacaagagtctcaaatacatcttcacccaggcagatctgaacatgaggcaaaggagatggttagagttgatcaaggactatgatctagaggtgcattaccaccctggtaaggccaatgttgtggcagatgccttaagcagaaaagcccagtgtaattgtatgagcatggatgtgggagttaccaccctgtgtgatgaattgtgcaaactgaacctggaagttgtttcttcgagtaacctaagctatatctcggtggaacccacattgcaagagcaaatagttcaggcacagcttggggataagggagttcaggttatcaaggatatgatcaaacaaaaggcagagaaatacaagtgtttccgacaggacagtaagggaattctatggtttggagatcgattggttgttcccaaggaccctgagcttagaaagaagatactggacgaagctcacctttccaaattctccatgcaccctggtagcaacaagatgtatcatgatctcagatctctatattggtggactagaatgaaaagggaaattgccaaatacatatccgaatgtgacacctgccagagaattaaggctagtcacttgaaggcagcaggccatttgcaaccccttcccataccatcttggaaatgggaggacatttgcatggacttcatagtgggattacccaatacctccaggcaccatgattctatttgggttatcgtggacagattgaccaagactgctcatttcttgcccctgcacaccacccacaagaccgagaagtatgctgagatttatgttgatcagatagtgagattgcatggtattcccaagaccattatatctgacagaggagcactgtttgtggcacgcttttgggagaaactgcaagaatcacttgggacccatgtcatccgaagctcagcataccacccacaaacagatggccagatagaaagggtgaatcaaattttggaagatatgttgcgagcctgtgcactacattatggaaaggaatgggacaagtgtctgtctttggcagagttctcttacaacaatagctatcagtccagtctgaagatggcaccttttgaggcattgtatgggagaaggtgtaggaccccactgaattggtctcaagcaggagaaagggaaatttttgggccagacttagtactcgaggcagaggcaaaggtcagggtcattaccaagaacttggaagctgctcaggctaggcaaaggagctatcatgataagaggcggaaacctctacagtttgaggtgggagatcatgtctatcttaaggtatcccccaccaagggtgttcagagattcgggatcaagggcaagttagcccctcgctacattggaccctatgagatcaaggcaagttgtggacccgtagcttaccaattggaattgccacctcacatgtcagcagtgcataatgtgttccatgtatctcagctacggaaatgtgttcgtctacccactgaagtactcccggaaccagacattgagatagaaccagatttatcctaccaagagtaccccgtcaaggtattagatcaaaaggagagatcaactcgggcaaggacagtaagaatgtataaggttcagtggagtcaccattcaacagaagaagctacatgggagactgaggattttctacgctctcgcttccccgactttctacccaaaagagtcggtatgtaaccacagaacccccccacctgccctttgaaatcaattataagggaaactaagatagcaagaatagtctaagttgggaattcaacttaagaagggcttccttctgaagttgcaaagagaatgacattcgaagagcagttaacaagagaaacttgagtataaagaaagagtagcaccaacacaccttccagcaccctccaagggactctacctcaaatctcgggacgagattcctttaaggggggagggctgtaacaccccaggtgttgccatggctggagcacaccttggcactcaagactatgatcacatgtgaaagaacttaaggagcaaaagtataaggggctttggaaactaagtttttaccaagagttgggaatgaccaaaggcattaccctaattgtgtgcaactatcaccttgggagagggggaaagaaccctaggcctctcttaaaccctatctcccaaaaccatggataagaggggaaagagagtgagcaaatgtgcaaaacatgggtaatttttacccaaaccctaagcaacattataaccatcaattaggggagggaaatattacaaaaaggcccctagggaaaccccatttcaaatctccaagtggagagagagctagagctctctaattccctctaagtcccattttagccctaaatcaaagatcaaccgtgttcactttaaaaatggcgccaaaaccacttgggttctataccaaaaatgtgcaataccacttagggcacccactggaaaaagttgagctcgagactcggacgtttgacatgccatggcatggcttttgtcgtgatatgctcagtatgacacacctgttttggcacccgaagatctccctccctaggccgtatctgccccggcgtctcacagttgagtgacagccctaggtgccaggaagaggtctgcgccggacttttgcaaagattcgcacgtttgcgacctctggcgacatttgaacactggaagaaacaaaccgccacgtgttcgacgccgtctgccgcgccagagcacgcccgcgcgcgcgcccgcgccgcgcccaagccaagccagtgccctggtccacgtccgcgactataaaacgcccaggagccttggccgtacccctccgcacgcgctcaagcctcaccggagctcagttcgccgccgtttgcccatacgcgacgtgcccgcggccacccgagcccctgccaccgtagaccggccagcccagccattcccaaccccgtccagcccccggagaagactgtgcacgtctccgtgaagctccccgagcgaggaatcgggctctgcttcaccggagaggccggcccaaggtcaccggacttcaaccgaccgccggcaactgtggaccgaggtacaccgtgcgcctctcttcgattccttgcacggttagactccttagacctccacgaagctccctatgcccttggattgaactatgccgccgtggataggccggagcacgcgccgccgacgagctcgcccgactgctcatgtggaccgggcgattccggccatccccgacgacgagccgtacctcgacgtgatcgccagaccctccccgagccaaccctacccttcgccggacctccctcgccgccggtaagccgcgccacccttttctttcccgcggctactgtttcagttgagggagggactgcgggtgagagggagagaaacccagggggttaagtgaaaggtcagagactcaagtgaatagtgccttaagggtagatctgcgaggtttgaattgttttaaacccagggacctcggcgcaaactgtttttccaggaaaacttaattaaaacctaatttaaattcaaacagaaactttaaaaacccataacttctgtttggtttatccaattttggtcaaaccaattttgccagactctaaatcatgtaacctatttaggaaaaatataaaaccccttggtacggtggaaaacttaaaagttctgatttaatgttaactttggccaaaagctaaataatagtaagaaaaatagttaggctatttgactaaggttaggaaaatttggagaagtttatattcacctactaacctgtttaaaaatgttaaacccctctatccattacattaagttagttttaaccccttattccaaatatgcttaagtttaagaaaaataggaaaagtgacacaaatattgaaccagagggcacccctatttttgttaagatacttagttaatgtagttcactagaaaaatatatcataccctgttttagtgtaaaataattaagatctcttttaaattaataaaacaaggataacttagaaaaactccacaaaaataaccccaaggtgaaaacacccccacccttgggatcactgttgttttattagaaagaacctaagaaaaatatgaaatctgctgtttgacatttttcaaataataaggaagtagaaagtgcctttttgacattaaacttgggaaaatcatagctaattaaccaccccttagtttcctatggtttttagcacaaagacctattattaccagaggatgtcaacaaaaataacctttaggacagagcctacccctaactaggaggtgtagtgtaaagtgcccctttttgcctaacttttgttatttttgtttaaggcctaacttttataccttaagcctcaaattcttaaaacaagctaaaatagccagtgacaacccactgtaatttttacagaatttttagaaattattaaaaccatgatgtagttcaaacctaccttagaaaccctaaatggaaaattaaataaaggaaaatgaaaaatgtgaaataatgatttccaaaaccttgtactctgtccactagagtgtatcaagacaatacaaattctactgtgtatcctaaagccaaaccttatgcttgg

SEQ ID NO: 693 - DNA, 7481 bp, Zea mays
  source: /note="Zea mays BAC clone full insert sequence contig bacb.pk155.h15.fis30"
ccgaaaacccacgttttctgtttgtgctcgaagcattaaggatcccagcatcctcatcgttccacagaatcctagcagcgtctggcttttctattagtagcttggctactaggaacccagcaatagaccacgtttggtacagccgcgactgtttcccaatgaatcgtgctctcttggtgtcgtagtactccggccatttgtcagtagcgattcgcctctcagctacttctatagctttggcagcaagttctggtctgttcatcttgatgcatgccactgtgagctgcacaaaatggttgccactgctcaacaacattcaatgtgcgcatcataaaggagaagtgcaaaatgcgagcgaacagattgccagtaaatctcagcaagtttggctaaatgcagcagtgtgtcaaaatgacaccatgccttgcatgcggacagataaaaaccaattcaacagcaagacacagtaaatctacagaaataggaaaccagtttagagaatgcaaacctgccacagtaatgttggccaggatcctccattgtggtatgaccaaggcctgtacgaaaaagaaattgccaagcatgtaaaaaggaactgcaacatgatcccaggtagagggtaaaaattgaaaaaacatctaaggctcacgtgtttttagggtcactcccagtgatgattttccattcctggttttcaagagcaggatagcatatctttagtggcatctctgcaactaaatcagaccatttagactcaataaggtctaaaatggcatgcgactgatgagttgttgccaagctgcttactattgaccataaatttcccagtgaaaagaatcggaagtccatatgagctggctggaggtttccaataaagtaaccacccttaggaggtatccactcaacaagccatggagaaatctgatcagggtaaatgttgaacttgttgacagcatcataagaatattcttctgttttatatcgatatatctcattcaatttttgcatgtcaagccaatagtactctctgatatgaaaggacagtgcaataagtctattgttcagggcacggattaagtcagctgatccatcttcttgagtcaacatctcacgcgcacacaagagggctgaatagaagagtgcctacacacaaaacaatgtgcatgagctaacttatcatgtacagaaaaaatgtgtgcctcttttttctttttcttttttgagaccatggagcttggattgagttttgcatggttattgtccttgtaaacttgtgtctgtcctaatcacaaatgttgtctgcattagtttattctctgcagtaccatcctcactgctactaatgatcaacttgtctatccatgccaatcaatccaaaaagctcactgcttcaggccattttccaatacaaattcatcccctatataaaacccccgatagtatccatgttttattgcaagtttgcaacagactttgaacatattgcaacaggctttgaacattagattgttttcatttagattacaagcgcaagtgatgttaacttttaggtggaaaatgcttacatcagctcaggattagaactgttggaactgtattagggtttgggtacatttactctcttgcccctctgtaatgggccaggcctaactccaaatggctattaatacacaggccaccctatcctaaggttaggttttgcatattcctacatggtactagagccacacaaacttcctccctcccctagccggccgccagcccctggccgccgccgctgcccctttccccatccccctccggccaccgccagatcgcctccatcccctctctccttcctggtcgccggccgcacccgcttctcccccttctccggtcgacgtcttcctcctccccccggccggcgagctcgggctcaaccgcgtcgtcgaccatccggccgcgctcacctctccctcccccagccggcgagctcgggctccaccgcgccccgaccagctagcgtgctcggtggccgcggcaccgcccaccacatccgcgccctcccctcgcgcgcggccacatcgtccgactgaagcagcaggcgcgtgcggctgcgcgtggcgctgtcggccacgagcgccttggaccgttgcaaccgccggagcgccgactcgctgctcttgcttcctctctgccccgcccccagcacctacagagcccgccgatccctgccccggccgccgaatcttcgtcgtccaccgccggccgccatctggcccctctcctgctgcgctgggccccggcgccgtgcccgctcttcccaagccgtgccgcaagtgggtcggcctcgccggagcagcctgcccccctgcgctccctcctgtcgtgccgcagtgggttggcctggccggagcagcagtcgtggccgtacagcccgctcaccccctgtgcgccctgcttctgtgacacagtggacatcctcgccctcggctttgctgcgccggttgagctccgtcccggttccatggcgtccccaccaccacacatgagctttgcctcgcccgctgctcccgtggctcctgactaccacggtcgtgcttttgccctggccgtcggcgccacttcttgtctccgcccgtttccgtcgggatggctgtgcgcgtccttctcaacgatggccagctcgtccggggcaccttcgtgagcttcgatcccaccatgagccctgtcctttgtgactgcgtcgaactccacccccaggccgaccgtcacgtgcctagaccccttgtcttccctcgtgcagtgatcgcctccctggccattgagccctcgttccctccctcccctcccagtaaccacgtcagagctcatcctctggtctctccgtgcaccctatggcctccccactgtctccctctcccaccgattgggtggtcgactccggggcctccttccacaccactcccacaactagttcgttattccactcccatccaccacacccctcacatccttcctccattgtcgtaggcaacggttccactcttccggtcacatcagtaggtgcatcagttcttcctggaccattctgccttaacgacgtccttgttgctcccggtctgactcatcccctcctctcggttcgtcgcttcactagtgacaaccactgctttatggagttcgacccctgggatctcaccatacgccaccttcccacacatgttgtgctcgctcgctgtgacagctccggtcccctctattctcttcacttgccctccacttcccccaccagaatagcctcatctcctgcacttactactaccaccacatcacatgctcttgctactaccaccacctcctccgccatttggcactgttgcctcgggcaccctggacctgacgtcatgtcccaactctccagccactcagacatatcctatactcgaggctcttctgagcacctctatcatgcttgtcagctcggccgtcactctcgtcttcctttttccacttccacgtccagggttgttcaggcctttgatcttgtccactgtgatctctggacgtctcctgtccttagcctctccggctacaaatactacctggtcattctggacgactactcccattttctttggactttcccccttcggttgaagtccgacacgtttaccaccctcactcacttcttcgcctgggtatccacccagtttcagcgcccggttcgtgctttgcattgcgacaacggccgcgatttcgataaccacgcctctcggtcattcttcctcaccagtggcgttcagctgcgtctctcgtgcccctacacctccgcccagaacggtcgggcagagcgcatgattcgcaccaccaccaacatgatccgctgccttctcttccaggcgtctctccctgccagctactgggcagaagccctacacaccgccacccacctcctcaactgtcttccctccaaggcggtgagccaccctactccctacttcgccctgtacggcacagcccccacctacgaccaccttcgcgtgttcggttgtgcctgctaccctaacacttctgctactgcccctcataagctttctcctcgctccacccactgcctcttccttggctactcatctgaccataagggatatcggtgtctggacctcacctcccaccgcatcatcatctctcgtcacgtcgtctttgatgaggatgtgtttccccttgttggcccctccccgcctaccgatctcgactccctcctcgagtccgatccagtctccccctcctcccaggcgccccgccttgcgtcgttacccgcaccccatgcggcctcgacgccgcggctcgcacatattcccacgccacgcgtggccccgtcgatcacgcctgcgccacgcgcggccccgacgaccacgcatgtgccacgtgcggccccgtcgaccacgcctgcgccatgcgcgaccccgtcgaccacgcccgcgcctcgggcggccccgccgacccctcccgcacctcgcgcggccccgtcgacgccaacggttcgcttcaccgaccccgcgctcatctaccaccgtcaccgccacgtcactacctcggcagtcgctgacccgggcccgttgacgagcccggtgcgcttcgccgaccccgccgtcatccatcatcgctgcgagtcggccacgcccgcagcccctgacgtcccggcagaccgccccgagccaccgatgtaccactcggtcgctatccaccgcgatccctggcacgtccacccgatggtgacccagcgcgccgctggcgtccttcgattgtcgaccggctgatcttggcagctgctacgcctaccactccaccggacgcttccccggtcccctcctccgttcgcaccgctctcgccgaaccacactggcgacgcgctatggaggagtacgcggccctcctggccaaccacacctgggacctggtgccacgtccaccaggcgccaacgtggtcaccggcaagtggctatttcgccacaagcttacttcggacggctccctcgatcgctacaaggcccgttgggtccttcggggcttcacccaacgccccagagtggactacgacgagacctctagccccgtcgtcaagttcgccactgttcgcaccgtcctctccctcgccctctcccgggactgggcgatccatcagctcgacgtcaagaatgccttcctccacggcactctgacggagactgtctactgcagccagcccaccggcttcgtcgacgaagcccgtccagatctggtctacaggctgaaccgctccctctacggcctcaagcaggcgtcgcgggcctggtacagccgcttcgcttcctacttgacctccatcggcttcgtcgaggccaagtcggacacgtccctcttcatctaccaccgcggcgacgacaccgtcttccttctgctctacatcgacgacattgtgctcacggcatccaccgccgacctcctacagcgcacgatcgtcgccctgcagcgggagttcgcgatgaaggacctagggcccctccaccacttcctcggcatcaccgccgagcgccggccccagggtctcttcctccatcagcgccagtacgccatcgacatactggagcgggctggtatgtccgactgcaagccctgctccacgcctgtcgacactcaggcgaagctctcagaggacgtcgggcccctggtcgccgatgcgacatcctaccggagcctgaccggcgcgctccagtacctcaccttatccaggcctgacatcgcctacgtcgtccatcaagtgtgcctccatatgcacaccccgcgggagcctcatctcaccgctctcaagcggatcctgcgctacctccgtggctccctcgactacggccttcttctccgaccatccccgacgtcggaactcgtggtctacaccgacgccgactgggctggctgtccagacacgcgtcgatccacctctggttacgccgtgttcctgggcgccaacctcgtctcctaggccgccaagcggcagcccgtcgtctctcgctccagtgctgaggccgagtaccgcgccgtggccaacggcgtggcagaggcctcctgctgcgacagctcctccacaagctccacagtcccctccagcgcgccaccctcgtctactgcgacaacgtcagcgcagtctacctctccaccaatcccgtacagcatcagcgcacgaagcacgtggagatcgacctgcacttcgtccgcgagcgtgtcgccgtcggtgacgttcgggttctcagcgtcccaactacgctgcagttcgctgacatcttcacaaggggttaccgtcgagtgtatttttagactttcgctctagtctcaacatctgtacaggatagagttgtgactgcggaggggtgttggaactgtattagggtttgggtacatttactctcttgtccctctgtaatgggccaggcccaactccaaatggctattaatacacaggccaccctatcctagggttagattttgcatattcctacaagaacaagacttgtacaaacttctgacataaaatctgctatttcgataaattaaaagatcaaattaaaaagaaactaatctctgcaactcctctaggatgctggattttttccttgtagacatctagacaagtgagaagggcaggtctggcacaatggtgagaaacctttccactgagcaaaaggtctaggattcaatgcagcctctctgcaaaatgcagaggtaaggattgccttggttactcctccggaccccactcatgtgagagctgccagcactgggtctgtcattttttagacatctagacaggtcttgctgtagtcctaagttgtcttcggtggatcgtgtaaaataggggacgtggcactgtaaattacacttttaataggactaagatgcatcagcagtggctaaaacttgtccaagcatgttatcgagatccctgagctattaatttgcaatttcatgtccctcaacttgttatgtggttcactcaaggtgcaaaccccatggtaaatcctttggctggcgacgtggacactaacaagactctatgctgatggacattaacaaggtgtgaacgagaggggggagaaagagatgtaggggctgccaagtaggatggtcgtggactagctgattttgaaggatcgaaccctgagtgaaccatttaggaagatcagggatgttttgaatccaaactaatcgtttgggaacctagatgacattcccagacaatttgaagaatgtttgtgtattttattcttttaaaaggtgcctcaaaaacaatcacaaaaaatcaacttgggaaaaaagacccgtatgaaacagaaaatataactaggtgtagcaaaaagaaaacctgaatttcaagtgggtgcccatggattcccattcgacgatcaatcatgcatgaaccatctgttacgagcaatgtagggaacatgtcgaaaccatcagctaag

SEQ ID NO: 694 - DNA, 13092 bp, Zea mays
  source: /note="Zea mays BAC clone full insert sequence contig bacb.pk155.h15.fis31"
aagtcattacggggatgacgaaccacacgacgtgcacgaccacggcgatctccatcgtccagctcagtgtcaccgccgtattcctgctccatctttgtggtcaatgcatcaaggcgtgccaggatggtgtcgagtgtggtgcgagtcgccgtttgagcaaggtcaagttggttgaaacgctcggtcgtcgaagtgatcgttgaatcaagccgttcatgcatcgtcctaatgtcagcagcaagtccatcaacttgtccccgtacttcctgcaactgggcatccaccatgtcgtgtgctcctgccatagttagcgcaaacaccaaaacaccaaaaggagaaaaaaaccaacgaccaaaaacaggggtgtactgctcacaaggcgctcacactagtgctgttatcaagttcttatccgttcttaccaagccacagtggtgaactgcaaccaacaggtggaaccggtgaaagattggatgagcgattgcctagagaaacagaaaccttctcgtcgtagaaatatgtggagttttgggtaggctgcactcaagtcaaggattagcacgatcaaacaataatgcaaagttgaattatagtgcaaaacacgaaactatattgctggccacaggtgcaaaggatggatggaactagcagaatggcagtaccgtaaatattgtactagtgatgccaaaaaggcactagtagaaaacacaggtgattttgtttttcttttttgtatgatttttttgatatttttctcagcaaaagaagcaacaagataggagctacacgaagtttcacctaaaacagatatcagatgtggtctatagaaaatcaggaagttctctgaaaagcgtgcgagaactttgacgaatttttttctttattttcctgaatttttttgataattttgtcgaaaccaaacagacaattttgtcgaaaccaaacagggctcagaatggtgtcaacaagctcctgtaaaaatttcagattttttggacacccgagcgaaaagttatgcccggtttacggaaggtacctcaagttatgttttaaaaacgaccgggatgaaacaaccgtatcctttctccttcgttttctttttttttgtttctgttttttttatgtaaccgaaggagaaaaacaaggaagcggtcgttgactcggtttgttttttttttctgttttttttgtaaccgaaggagaaaatcaaggaaacggccgttgactcggtttgtttttttctgtttttttttgacgtaaccgaaggagaaaaataaggaaacaatgttgactcgatttgtggcgtgatcaaacgggagatggtggcggcgctagggtttgaatggtggaagaacacaatgcaaccagcaacaaatgacgcgaaagcacacaaattcaacaatgcagattatggaaagaaagtgcgaggctcaaaaggtgctgggataagatctaacctgaattttaatgtggttttgtggactgtaggaaaaaaaacgctcaataaactcaccgatcaacctggaaatctgataccaattgatgaagctgaggtgcccgatctttcggcgagtagagataattccgatttggcggaagatgacccttgcgatccgactacgacgagcaagcccgaggcgccaatgcaatcgctgaaccaactccctgtggttaccgaccttgctgatgcgagatcggcctgatcacgaagatcgtttcctgtgcgcaatcgaagaacgaacaagaaaaagatgcgagcaatctaatctattactcgagggtggagttctgaatacacgaagacagcgcagatttgcgcgcgttcgagagtagctaaggctaacgtaaaacaaaactcgagaataaaggaggcgcagctcctggataaatagagggggcgcagcccctaggggcggccaaccctaggtcgtccactatgggccgcagttgggctggtcgtctattcttctgggccctcattcttcagtagcatgacgaagttaagatctctggcacgggcccgagtgattggcccagctaatgaaggaagtggcgcttgatgtggaggtgctgctggtgtagtcgtactcatagtgatgtcctcatcaaagctcctccgaagccgaggtcgagtctgtcttccgtggctgaggtcgagtccgagcccctgggtcgggcgaggcggaggccgccggctgaggccagggcggagtccgagccctggggtcgggcggagcggagttcgccgtcttctagggcttagcccaagtccgagccctgggtcgggcggagcggagttcgccgtcttccgagacttagcccgagtccgagccctgggtcgggcggagcggagttcgccgtcttccgggacttagcccgtgtccgagccctgggtcgggcgaagcggagtttcctatggtgccttcggcagggcctgaccgcctgtcagtctcactctgtcaagtggcaccgcagtcggagtggcgcaggcggcgctgtccttctgtcaggccggtcagtggagcggcgaagtgacgacggtcacttcggctctgccggctggggggcgcgcgtcaggataaaggtgtcaggccacctttgcattaaatgctcctgcgatttggtcggtcggtgcggcgatttggtcagggttgcttcttggcgaagacagggcctcgggcgagccggaaatatgttcgccgctggaggggggcctcgggcgagacggaaaccctccggggtcggctgcccttgtccgaggctaggctcgggcgaggcgtgatcgagtccctcgaatggaatgatccctgacttaatcgcacccatcaggcctttgcagctttgtgctgatgggggttaccagctgagaattaggagccttgagggtacccctaattatggtccccgacagtagcccccgagcctcgaagggagtgttagcactcgcttggaggctttcgtcgcacttttttgcaaggggaccagcctttctcggttgcgttttgtttcggtgggtgcgcgcgagcgcacccgccgggtgtagcccccgaggcctcggaggagtggtttcactccttcgaggtcttaatgcctcgcgtaatgcttcggctggtctggtcgttccctcatgcgagctggccgtagcccgggtgtacggtcgggtcccaagttctcgggctggtatgttgacgctgtcaacggttcggccggagccgggtttgcgagagcagcccccgagcctccgcacaaggcgagagggcgatcagggacagactcggcttttttacatacgcccctgcgtcgcctttccgcaaggaggagggggggaaagcgccatgttgccctcgatgggcgccgaacatggtgtctctggtgagctgcaagagggtaatccgagtggacgtccgtgccccgttcgttaggggtcggctaggggcccagaggcacgcccaaaagtacctgcgggtgatctgtcggacccggtcccctggcaacggggtccgagggctcaatgcctccctctgatgggattccgttacaagatcgttcccgctggtctcggaaatgtcctagggtacctcgggagcgcagcccaagccttggttatgtatcgaacgtacccatggtcatccctcgctcggagtttgaggcggctgtgaacccttcgggggccagccttcgaacccctgatcagtaatgggcgcggagcccgagtagcctgaggcggccgtggaacccttccgaggggccggccttcgaacctctgaccagtagtgggtgtagggcccacacgatctgaggcggctgtcgaacccttccggggggccagccttcgaacctctaatcagtagagaggctcagagcctggttccttcacggggaaggatccttttcggggtatccccctttcccggtccctgttgcaagagagagaaagaggaaaaaaggaaaaggatacgaaatcgaacgacgcggcgtaccttttttgacgcggtcattatggcgaaggcgaagcgtcgccagcttctcctgccaggggcgccgcctgtcccgccgcggagttaatgcgacggggcgagtggttggcggggcggccgttgcgcatgcgcgagccgttcgaggaacggagcacgggcgcgttgtcttcacgtcgtgagagagggttctcttgctgcccccggatggggcgtgagcttgtgccgccctcgggcgtcttgtcgcagccgaagcaccaggtcgcccacctggaggtctcgggaccggacccctcgggcgtggtagcgtcgcagggactgctggtaccgcgctgagtgtagtaaggccttgtcccgagcctcctccagctggtccaacgagtcttctcggctagcttggttgctttggtcggtgtaggccctcgtcctcggggagccgtattccaggtctgtgggcaagacggcctcgaccccgtagactaggaagaacggcgtgaagcccgtggttcggctcggcgttgtcctcagactccagaccaccgaggggagttccttcatccatcgcttgccgaacttgttgaggtcattgtagatccgaggctgagcccttgcagaatcatgccgttggcacgctctacttgcccatttgacatggggtgagctacggcggcctagtccacccggatgtggtgatccccgcagaagtccaggaactttctgccggtgaactgggtgccgttgtcggtgatgatggagtttgggaccccgaagcgatggatgatgttggtgaagaacgccatcgcctgttcggacctgatgctgtttaggggtcggacctcgatccacttggagaatttgtcgatggcgaccagcaggtgcgtgtagcccccgggtgccttctgcaaggggccgacgagatccagaccccacacagcaaaaggccaggtgatgggcatcgtctgcagagcctgagcgggcaggtgggtctgccttgcgtagaactgacacccttcgcaggtgcgaacaattctagtggcgtcggccactgccgtcggccagtagaagccttgtcggaaagcattcccgacaagggctcgaggcgctgcgtgatggccgcaagcccccgagtgtatctctcgcaggagttcctgaccttcggcgatggagatgcatcgctggaggatgccagaggggctacggtggtagagctccttctcatcgcccagcaagacgaacgacttggcgcgtcgcgccaaccgccgagcctcggctcggtcgaggggtagctctcctcagtggagatattgcaggtacggggtccgccagttttgattaggcgtgaccccgcttcgctcctcctcgacgcgcagtgcctcaccctcgggtgccgagggtgcctcgggctgagccgagggtggctcgggccgggctgagggtgcctcgggccgtgccgaagatacctcggactgagccgaggttacctcgggctgggccgagggtgccttgggctcgggcgtgtcgtcgatcttgatggagggttgatgtaggtctcgggagaagacgtccggggaaccattgttcgccccgaggctattttagccagctcgtccgcagtctcgttgtagcgccgggcgatgtggctgagctcgagcccgtagaatttgtcctccaggcgccgaacctcatcgcagtaggcctccatcttcgggtcgcggcagtgggagttcttcatgacttggtcgatgacgagctgcgagtcaccgcgagcgtcgaggcgtcggacccctagctcgatggcgatccgcaacccgttgaccagagcctcatactcagccacattgttggacgcagggaaatggaggcgtagcacatagcgtatgtgtttcccgaggggcgagatgaagagtaggcctgcgccggctcccgtcttcatcaacgacccgtcgaagaacatggtccagagcttcggttggatcggagccgtcggtagctgggtgtcgacccattcggccacgaagtccgccaagacctgggacttgatggccttccgaggggcgaacgagattgtctcgcccatgatttccaccgcccactttgcaatcctacccgaggcctctcggcactggatgatctcccccagggggaaggatgacaccacggttaccggatgagactcgaagtagtgtcgcaacttccgccgtgtcaggatcactgcatacagcagcttctgaacttgtgggtagcagatcttggtttcggacagtacctcgctgacgaagtaaactggcctctgaacgggcaatgcatgcccctcttcttgcctctcgaccacaatcgcggcgctaaccacctgagtggtcgcggcgacgtagaccaagagggcttctccggcagctaggggcaccaggataggcgcctttgtgaggagcgccttcaagttcccgagggcttcctcggcctcaggggtccaagtgaagcactcggccttcctcaagaggcggtacagaggtagacctctttcgccgaggcgtgagatgaagcggctcagagccgcgagacatcccatgaccctctgtacgcctttcaagtccttgatgggccccatgctggtgatggctgcgatcttctccgggttggcttcgatgccccgctcggagacgatgaaccccaagagcatgcctcggggcaccccgaagacacacttctcgggattgagcttgacgcctttcgccttgagacatcggaatgtcacttcaaggtcggaaaggaggtcagaagctttcctcgtcttgactacgatgtcatcgacgtaggcctcaaccgtgcggccaatgtgttcgccgaacacatggttcatgcaccgctggtacgtcgcgcccgcattcctcaagccgaacggcatggtgacatagcagtacatgccgaagggtgtgatgaaagaagtcgcgagctggtcggactctttcatcctgatttgatgataccctgagtaggcatcgaggaaagacagggtttcgcacccagcagtggaatccacgatttgatcgatgcgaggcagagggtagggaaccttcggacatgctttgttgagaccagtgtagtctacacacatccgccatttcccccctttctttctcacaagcacagggttggcaagccattcaggatggaatacctctttgatgaaccctgccgccattagcttgtggatctcctcgcctatggctctgcgcttctcctcgtcgaatcggcgcagaggctgcttgacgggtcgggctccggctcggatgtccagtgagtgctcggcgacatccctcggtatgccaggcatgtccgagggactccacgcaaaaacgtcggcgttcgcgcggagaaagtcgacgagcactgcttcctatttgggatcgagcccggagccgatccggatctgcttggaggcgtcgccgctggggtcgaaggggatggacttaaccgtctccgctggctcaaagttgccggcatgacgcttcacgtctggcacctccttcgagaggctctccaggtcggcgatgagggcctcggactcggcgagggcctcggcgtactccacgcactccacgtcgcattcgaacgcgtgtttgtacgtggggccgacggtgatgatcccgttggggcccgacatcttgagcttcaggtaggtgtagttggggacgaccatgaacttcgcgtagcacggtcttcccagcacagcgtggtaggttcctctgaacccgaccacctcgaacgtcagggtctcccttcggaagttggagggtgttccgaagcagacaggaagctcgagttgtccgaggggctggacgcgcttcccgggaatgatcccatggaagggcgcagcgcctgctcggacggaggacagatcgacacgcaggagcccgagggtctcggcgtagacgatgttgaggctgctgcctccgtcaatgaggaccttggtgagcctgacgttgctgatgacggggtcgacgacgagcgggtatttccccggactcggcacatggtcggggtggtcggcctggtcgaaggtgatgggcttgtcggaccagtctaggtagactggcgccgccaccttcaccgagcagacctcccgacgctcttgcttgcggtgccgagccgaggcgttcgccacttgcccaccgtagatcatgaagcagtcgcggacctcggggaactctcctgcttggtgatcttccttcttatcatcgtcgcgggccctgccaccctccgcgggtggcccggccctgtggaagtggcgccggagcatgacgcactcctcaagggtgtgcttgacgggcccctggtgataggggcacggctccttgagcatcttgtcgaagaggttggcacctcctgggggtttccgagggttcttgtactcggcggcggcgacaaggtccgcgtcggcggcgtcgcgtttcgcttgcgacttcttcttgcccttcttcttggcgccgcgctgagttgacgcctcgggagcatcttccgatgggcggccctggggctacttgtcctttcggaagatagcctcgaccgcctcctggccggaggcgaacttggtggcgatgtccatcagctcgctcgtcctggtgggggtcttgcgacccagcttgctcaccaggtcgcggcaggtggtgccggcgaggaacgcgccgatgacatctgagtcggtgatgttgggcagctcggtgcgctgcttcgagaatcgccggatgtagtcccggagagactctcccggctgctgccggcagcttcggaggtcccaggaattcccgaggcgcatgtacgtgccctggaaattgccggcaaaagcttggactaggtcgtcccagctggagatctgccccggaggcaggtgctccaaccaggcacgagcggtgtcggagaggaacagggggaggttgcggatgatgaggttgtcatcgtccgttccacccagttggcaggccagacggtagtccgcgagccacagttccggtctcgtctcccccgagtactttgtgatagtggtcgggggtcggaaccgggtctggaacggtgcccgtcggatggcccggctgaaggcctgcggaccgggtggttcgggcgagggactccgatcctccccgctgtcgtagcgtcccccacgcctggggtggtagcctcggcgcaccctctcgtcgaggtgggcccgacggtcgcggtgatggtgctcgttgccgaggcggcccggggccacaggcgtggtgttgcgcgtgcgcccggtgtagaccgaggcttcccacatgaatcgggaagtcgtggcataaggttccgaggggtacccctgccttcgggaggcagagctctcggcccgtcggaccgcggcgccttccaggagattcttgagctccccctggattcgccggccctcggtggttgatggctccggcatcgcgcggagaagcgctgctgcagccaggttctggccgaccccactagatgcgggtggtggcctgaccctgacgtcgtcggcgacgtggtgctggaagccctggggcagatgacgtatttctccggccgggggttggcccgcccatgcctgcccgacgtcccggcggatcggctcaagcgctcctgctccctcgtcgagcctggcctgcaccccgcggatttgctcgagctgtgggtcatgcccccccgtctgaacggggaccacagctagctcccgtgggatgccaacgcggggcaccggcctagggagatcaccgtcctccggcatgccgagatgattgccttcggagggaccccctagatcgacgtggaaacattcgcggctcgggccgtagtcctcgtcgccgaggctgcggctcgggccgtagtcctcgtcgccgaggctgcggctaccgtcggaatagtcggagaggcagtagtcacatgcggtcatgaagtcccgcatggcactggggttgccaagtccagagaaatcccaacagatgttgggctcgtagtcttcctcggacccagagggcccgacggtcgagacgtccgtcagccggtcccaaggcgaccgcatgcgaaaccccagagggtttggactcgcctcttcgagagcgcccgccaaagcggggtcgctaggcgggttgaggctgaatccaaatgacgtgggatgggaatcggtcggtaccttttggtcgacgagcggcgataaagtcacgccggggactgactgcaccatcgtctcaggtacgagggtgacgtccagcaagcttttcgcgagcgcgctggcgtcgtccgcttgctcgggattggcgtgtcgcggggagacgacactcgtcttcatctcaagcgcgaagtcgatacccggtgcgctccccgttggggtgccggcgctgtcgactcgctcgacagccgacgaggcgctgcctcctgcttggccttggttgccctgccttcccctctgacggcggggaagagggcgggatgagctcgaaggttgttcttccaccacgcgaggaagacgtcgtcgattccgccgccggcgggcgggcagtcggccgccattgtcgttgtcgcgcggcggtggaaggagtatcatgtcgtagctgccgtcgagggacatgaactcaagactcccgaaacggagcaccgtctcgggttggagaggttgctggagactgcccatctggagcttgacgggaagctgttcgtcaacacgcagcaggcccctacctggcgcgccaactgtcggcgtttcgagaccggggggtccctgggccgacgagtgaatgtcgccgcgtgccccagcccagatgggtcgagcgcgagggcgagcgcgaaggggggagagcgaggcggtcggagaccggcgtgagagaggtgggaatcccgcggccttcgtgttcgtcccacgcccaggtcgggtgcgcttgtagtagggagttacaagcgtccacgcgggagagggagcgagcggcttcaagcgagcgcctatctcgtcctcgtccccgcgcagccaaccccctctaagagggccctggtccttccttttataggcgtaaggagaggatccaggtgtacaatggggggtgtagcagagtgctacgtgtctagcggaggagagctagcgccctaagtacacgccgttgtggcagccggagagattttggcacccagctggtgtgatgtcgtggccgtcggaggagcgatggagcctggcggagggatagctgtcggagcgattgagtccttgctgacgtcctcttgcttccgtaagggggctgagagccgccgtcgtcacagagaatgcggggcgccatcattgcctgtctggcggagcgagccagatgggacgccagtcttgttccctgcggcccgagtcagctcagggtagggtgatgatggcgcctcctgttgacgtggccggtctgcgtcctaggttgggcgatgtggaagctcctccgaagccgaggtcgagtctgtcttccgtggctgaggtcgagtccgagcccctgggtcgggcgaggcggaggccagggcggagtccgagccctggggtcgggcggagcggagttcgccgtcttctggggcttagcccaagtccgagccctgggtcgggtggagcggagttcgccgtcttccgggacttagcccgactccgagccctgggtcgggcggagcggagttcgccgtcttcctggacttagcccgagtccgagccctgggtcgggcggagcggagttcaccgtcttccgggacttagcccgtgtccgagccatgggtcgggcgaagcggagtttcctatggtgccttcggcagggcctgaccgcctgttagtctcactctgtcaagtggcaccgcagtcggagtggcgcaggcggcgctgtccttctgtcaggccggtcagtggagcgacgaagtgacggcggtcacttcggctctgccggctggggggcgcgcgtcaggataaaggtgtcaggccacctttgcattaaatgctcctgcgatttggtcggtcggtgcggcgatttggtcagggttgcttcttggtgaagacagggcctcgggcgagccggaaatatgttcgccgctggaggggggcctcgggcgagacggaaaccctccggggtcggctgcccttgtccgaggctaggctcgggcgaggcgtgatcgagtccctcgaatggactgatccctgacttaatcgcaccatcaggcctttgcagctttgtgctggttggggttaccagctgagaattaggagccttgagggtacccctaattatggtccccgacacaaatacaatttgattcatacaattttttatgaactaccatttttccgcatgtatggctttaagttcttgataaacccaatgggtagaagggtgcccgatctttcgatgagagatgatggaggtggaaaacttgttggagaacgacgttggctgcccgactaccacaaccaagatggtgttgcgccttgagcgacaggtacaccgtctcctgataactacgatttggggtggaggtcgacgttgtgctatccgactacaacaaccacaagggtgctgcgccttagcgatagttacaccggctcctgttgttgctgctcttgccgtgccaagaacagccttgaacctgcaagcaatcgagaacaagcaagaacaagataacaagcaaacacgcaccgatctgataaagttggggtctcgtttcaagtattcgggtggtctagccgacacacgcgtttacaaggaagtagcaaaggctaaacttacatcaaacaaaacccccatgttctttggtggctgctagttgcttaaatagagaaataggaagaaggaattctggtggagtcatgaagttccctcggcagtttctggacgcctcaggtgtagtctcccattaattcttgatccaccagcaagtatacgaagggagctttccaacaagtatttatttgcattaaacggccttggaagttggaagatatgccccatttaaacttgtacttggtgctgttacgaaatcctctcgggtgcagcagcctttattgccttgttgccttctccagtccaagatggttcaccctcccaaacacctgagcataataaagtcatcgcaaggc

SEQ ID NO: 695 - DNA, 3234 bp, Zea mays
  source: /note="Zea mays BAC clone full insert sequence contig bacm.pk128.j21.core.fis1"
ttccggtgtcaaaaactcgtgctttgtatgcaccccgacaaccgttttcggaatgtgtgacgtgcgacaacgaaattgcgcgaaaccaccccaaacatgtgatgaggacatcaacaccaacacgagcacatctacaccagcagcaccttctccagcccaggcgccaccccttccacctgggccagtgactcgggcccgtgcaagagaattgaactacatcatgttgttaaagaacgaaggcccggaaggatagacgaccagcccaattgcggcccataatggacgacctagggttggccgcccctaggggctgcgccccctctctatttatacaggagctgcgcctcctttatttttgggagttttgttttacgttagccttagctacttccgaacacgcgcaaatctgcgctgtcctcgtgtattcagaactccaccctcgagtaatagattagattgctcgcatcttgttcttgttcgttcttcgattgcgcacaggaaacgatcttcgtgatcaggccgatctcgcatcagcaaggtcggtaaccacagggagttggttcagcgattgcattggcacctcgggcttgctcgtcgtagtcggatcgcaagggtcatcttccgccaaatcggaattatctctactcgccgaaagatcgggcacctcagctacatcaattggtatcagatttccaggttgatcggtgagtttatcgagcgttttttttcctacagtccacaaaaccacataaaaattcaggttagttcttatcccagcacccttttgagcctcgcactttctttcaataatctgcattgttgaatttgtgtgctttcgcgtttccttgttgctggttgcattgtgttcttccaccattcatatcctagcgccgccaccatctcccctttgatcacgccacaaaccgagtcaacattgtttccttgtttttctccttcggttacgtaaaaaaaaacagaaaaaacaaaccgagtcaacggccgtttccttgtttttctccttcggttacgaaaaaaaacagaaaaaaaaaaaccgaggcaacatcgtttccttgtttttctccttcggttacgtcaaaaaaaaaacagaaacaaaaaaaaacaacgaaggagaaaggatacggttgtttcatcccggtcgtttgaaaacataacttgaggtaccttccttaaaccgggcataacttttcgctcgggtgtccgaaaaatctgaaatttttacaggagctagttgacaccattctgaggccggccaaactcaccttcggtctgtttgggttcgacaaaattgtcaaaaaaattcaggaaaataaagaaaaaaatccgtcaaagttctcgcacgcttttcagagaacttcctgattttctgtagaccacatttgaactctgttttaggtgaaacttcgtgtagctcctattttgttgcttcttgtgctgagaaaaatatcaaaaaaatcatacaaaaaagaaaaacaaaatcacttgtgattcctactagtggcctcgctagtacaatatttacggtactgccattctgctagttccatccgtcctttgcacttgtggccagcaatatagtttcgtgttttgcactataattcaactttgcattattgtttggtcgtgctaatccttgacttgagtgcagcctacccagaactccacatatttctacgacgagtaggtttctgtttctccaggcaatcgctcatccaatctttcaccggttccacctgttggttgcagttcaccactgtggcttggtaagaacggataagaatttgataacagcactagtgtgagcgccttgtgagcagtacacccctgtttttgtcgttttttttggtgttttggtgtttgcgctaactatggcaggagcacatgacacggtggatgcccagttgctggaagtaaagggacaagttgatggacttgctgatgacattaggacgatgcatgaacggcttgattcaacggtcacttcgacgaccgagcgtttcaaccagcttgaccttgctcaaacggcgactcgcaccacactcgactccatcctggcacgccttgatgcgttgaccacaaagatggagcaggactacggcggtgacactgagtgggacgatggagatcgccgtggtcgtgcacgccgtgtggttcgtcatccccctaatgacttattttctaagattaaatttaaaattccaccttttaatggcaaatatgatcctgctgcatatcttgattgggagttagaggttgaacaaaaattttcatgccatgatattgctgcacattctcaggttaaagctgctattagtgaatttactgattttgctttaatttggtggcgtgagtttaaaataaaacatcccactaccattccaaccacttgggatcagttgaaagctgcgatgcgacatcgatttgtgccttcgtattatgctcgtgatttgcttaataaaatgcagcgttttcagcaaggttctcaatctgttgaggactatttccaggagttacaaaaaggtatgattcgttgtgggatattggaggacaacgacgctgctatggcacgttttcgtggtggtttaaaccgcgaaatccaagatatacttgattataaggaatattatgatatgactactttatttgaatatgcttgcaaagctgaacgtgaagtgcagggacgccgctcgaagccatattctaacccttttgcaggacgaagctcgacatccacctcagcaccagttccccctgcgccatccacgtccaccactactccacgcgagaagacgaccaaaccagccagcactgccgcacccacaggtcgtacacgggatattcagtgtcatcgctgtagaggatttggccatgtgattcgggactgcccaaacaagcgcactttactcattcgtgacgatggtgagtactcttccgctagtgattctgaagaaattgaacatgcactacttgccactgaccatgcagctaaggcggaggtacatgtcaacccgggcgacgctgataggtatgaaagtcttgttgtgcagcgtgttcttagtacacaggtcgctttgcccgagaagaatcagcgacacactctgttccatacaaagggtgttgtgcaggagcggtcaattcgcatcattatcgacagcggcagttgcaacaatttggcgagtaccatgctggtcgaaaagttgtcgttacccactcgta

SEQ ID NO: 696 - DNA, 6575 bp, Zea mays
  source: /note="Zea mays BAC clone full insert sequence contig bacm.pk128.j21.core.fis2"
ttccggtggcaaaaactcgtgctttgtatgcacccgacacccgttttcggaaagggtgacgtgcgacaacgaaattgcgcgaaaccaccccaaacatgagttttggacctaaagtagtggattgggcatgtttgttgctgatgtagctgaggtgcccgatctttcggcgagtagagataattccgatttggcggaagatgacccttgcgatccgactacgacgagcaagcccgaggcgccaatgcaatcgctgaaccaactccctgtggttaccgaccttgctgatgcgagatcggcctgatcacgaagatcgtttcctgtgcgcaatcgaagaacgaacaagaacaagatgcgagcaatctaatctattactcgagggtggagttctgaatacacgaggacagcgcagatttgcgcgtgttcggaagtagctaaggctaacgtaaaacaaaactccccaaaaataaaggaggcgcagctcctgtataaatagagagggggcgcagcccctaggggcggccaaccctaggtcgtccattatgggccgcaattgggctggtcgtctatccttccgggccttcgttctttaacaacatgatgtagttcaattctcttgcacgggcccgagtcactggcccaggtggaaggggtggcgcctgggctggagaaggtgctgctggtgtagatgtgctcgtgttggtgttgatgtcctcatcatcctccccttcttgaactgaagtcgtcctcgacggcaactcctcatcttctcccgcatacggtttcaaatctgcaacattaaaactagtggaaacaccaaactccgcaggcaggtcaaggatataagcattatcattaatcttggttagtaccttaaaaggaccagcagcacgaggcatcaatttagaacggcgcaaagtaggaaaacgatcctttctcaaatgcaaccaaaccatatcaccaggttcaaaagtaactagtttccggcctttactaccagtaatctgatatttagcattagcagcagcaatgttttgttgagtttgttcatggagattaatcatttgttcaacatgtgcaagagcatctatgtgtggggcgtccgtagcatcaagcgaaaacaaagcaataggcgccctaggaatgtaaccataaacaatttgaaaagggcacatctttgtagaagaatgtgttgcatgattataagcaaactcaacatgaggtaagcaatcctcccaacgtttcaaatttttgtctaaaacagccctaagcatggtagacaaagttcgattaactacctcagtttgaccatcagtctgagggtgacaagtggtgctaaacagcaatttagttcctaatttattccacagagatctccaaaaatgactcagaaacttggcatcacgatccgagactattgtattgggaataccgtgcaaacgaataatctctctaaaaaacaattcagcaacattgctagcatcatcagtcttatgacaaggtatgaaatgagccattttggagaatcgatcaacaaccacaaaaatgctatccctccccttcttagttctaggcaatcccaaaacaaaatccatcgaaatatcaatccaagggaaagtaggaacaggcaaaggcatatacaaaccatggttgttcaaccgtgacttagctttctgacaagtagtgcagcgtgcaacaaggcgctcaacatcagcgcgcatccgaggccaaaagaagtgggcagccaacacctcatgtgtcttgtagacgccaaagtgccccatgagaccgcctccatgtgcttcctgtaacaacaaaagacgaaccgagctagctggaacacacagcttgttagcgcgaaacaggaacccatcctgtatgtgaaatttgccccatggtttcccattaatacaatggccgaaagcatctttaaaatcagcatcgtcaacatattgatcttttacagtgtgcaaaccaaagattttaaaatctaactgtgacagcatggtatagcgacgagacaaagcatcagcaataacattgtccttcccgttcttgtgtttaataatgtaaggaaaagactcaatgaattctacccatttagcatgacgacggttcagatttgtttgggtacgaatatgttttaaagcctcatgatcagaatgaattatgaactcacgatgccaaagatagtgctgccatgtatgtaaagtgcgcactaacgcgtaaagctccttatcataagtagaatatttcagactagcaccgcttaatttttcactaaaataagcaactggttttccttcttgtaataaaacagcacctagcccaataccgctagcatcgcattcaagctcaaatactttattaaaatcaggcaattgcaataggggagcttgggttaacttatctttcaaagtgctgaacgcttcctcctgcgaatcactccaagcaaatggcacatctttctttgtaagctcatgtagaggcgctgcaatggagctaaaatcacgaacaaatctgcggtagaaaccggcaagtccaagaaagctccgaatttgtgtgaccgtcgtcggtgtaggccactcccgaatggcagcaatcttgctgctatccacctcaatgccctgtggagtaacaacataaccaagaaacgagacacgtcgtgtgcaaaagatgcatttttccatgttagcgaataactgggcggcacgcaatgcatcaaaaacagcacttaaatgttccaaatgctctttcttagatttgctgtaaataaggatatcatcgaaataaacaaccacaaacaatcctatgaagggcctcagaacttcattcatcactcgcataaaagtgctgggagcattagtcaatccaaacggcataaccaaccattcatataaaccaaatttcgttttgaaggctgttttccattcatcacctagtttcattctaatctggtggtaaccactacgcaaatcaatcttagtgaaaataatggcaccactaagctcatctagcatatcatcaaggcgtggtataggatagcgataacgaatagtgatattattaatagcacgacagtctacacacatacgccatgacccatccttcttgggaacaagtaacacaggaacagagcaagggctaagagactcacgaatgtatcctttgtcaagcaacgcctttacctggcgctgaatctccttcgtctcatccggatttgtacggtatggtgcgcggtttggaagctgtgcaccgggaatgaggtcgatctggtgctcaatgccacgaagcggtgggagacccggtggtaagtctttgggaaagacatcagcgtactcctgcaaaaggttagcaaccatagggggaatagccaaagatggtgcatcatcaagtgaaatgaggacactagagcatacaagtgcatagcatggcaaatgagcaccgtgtagatcatcaaaatcagcacgtgtagcaagtaaaacaggagccttcaacttaatttcagaaggaacagagtgcgatggatcaagttgtttagcagttatagcagctcgggcaagatcatctttaacaatttgttcaggtgtcattggatgtataattattttctgacccttaaaaatgaaagaataatgattcgaacgaccatgatgcaagctatcagtatcatattgccaaggtcgaccaagtaacaaagagcatgcttccatgggaataacatcacaatcaacaaaatcagaataagcacccatggagaaaggaactcgcacggaacgcgtgatttttattttaccaccatcattaagccattgaatgtgatatgggttcggatgcttacgagtgggtaacgacaacttttcgaccagcatggtactcgccaaattgttgcaactgccgctgtcgataatgatgcgaattgaccgctcctgcacaacaccctttgtatggaacagagtgtgtcgctgattcttctcgggcaaagcgacctgtgtactgagaacacgctgcacaacaagactttcatacctatcagcgtcgcccgggttgacatgtacctccgccttagctgcatggtcagtggcaagtagtgcatgttcaatttcttcagaatcactagcggaagagtactcaccatcgtcacgaatgagtaaagtgcgcttgtttggacagtcccgaatcacatggccaaatcctctacagcgatgacactgaatatcccgtgtacgacctgtgggtggggcagtgctggctggtttggtcgtcttctcgcgtggagtagtggtggacgtggatggcgcagggggaactggtgctgaggtggatgtcgagcttcgtcctgcaaaagggttagaatattgcttcgagcggcgtccctgcacttcacgttcagctttgcaagcatattcaaataaagtagtcatatcataatattccttataatcaagtatatcttggatttcgcggtttaaaccaccacgaaaacgtgccatagcagcgtcgttgtcctccaatatcccacaacgaatcatacctttttgtaactcctggaaatagtcctcaacagattgagaaccttgctgaaaacgctgcattttattaagcaaatcacgagcataatacgaaggcacaaatcgatgtcgcatcgcagctttcaactgatcccaagtggttggaatggtagtgggatgttttattttaaactcacgccaccaaattaaagcaaaatcagtaaattcactaatagcagctttaacctgagaatgtgcagcaatatcatggcatgaaaatttttgttcaacctctaactcccaatcaagatatgcagcaggatcatatttgccattaaaaggtggaattttaaatttaatcttagaaaataagtcattagggggattacgaaccacacggcgtgcacgaccacggcgatctccatcgtcccactcagtgtcaccgccgtagtcctgctccatctttgtggtcaacgcatcaaggcgtgctaggatggtgtcgagtgtggtgcgagtcgccgtttgagcaaggtcaagctggttgaaacgctcggtcgtcgaagtgaccgttgaatcaagccgttcatgcatcgtcctaatgtcatcagcaagtccatcaacttgtccctttacttccagcaactgggcatccaccgtgtcatgtgctcctgccatagttagcgcaaacaccaaaacaccaaaaaaaacgacaaaaacaggggtgtactgctcacaaggcgctcacactagtgctgttatcaaattcttatccgttcttaccaagccacagtggtgaactgcaaccaacaggtggaaccggtgaaagattggatgagcgattgcctggagaaacagaaacctactcgttgtagaaatatgtggagttctgggtaggctgcactcaagtcaaggattagcacgaccaaacaataatgcaaagttgaattatagtgcaaaacacgaaactatattgctggccacaagtgcaaaggacggatggaactagcagaatggcagtaccgtaaatattgtactagcgaggccactagtaggaatcacaagtgattttgtttttcttttttgtatgatttttttggtatttttctcagcacaagaagcaacaaaataggagctacacgaagtttcacctaaaacagagttcaaatgtggtctacagaaaatcagaaagttctctaaaaagcgtgcgagaactttgaaggattttttctttattttcctgaattttttttgacaattttgtcgaacccaaacagaccgaaggtcagtttggccggcctcagaatggtgtcaactagctcctgtaaaaatttcagatttttcggacacccgagcgaaaagttatgcccggtttaaggaaggtacctcaagttatgttttcaaacgaccgggatgaaacaaccgtatcctttctccttcgttgttttttttgtttctgttttttttgacgtaaccgaaggagaaaaacaaggaaacgatgttgactcggttttttttttctgtttttttttcgtaaccgaaggagaaaaacaaggaaacggccgttgactcggtttgttttttctgttttttttttgacgtaaccgaaggagaaaaacaaggaaacaatgttgactcggtttgtggcgtgatcaaagaggagatggtggcggcgctaggatttgaatggtggaagaacacaatgcaaccagcaacaaatgacgcgaaagcacacaaattcaacaatgcagattattgaaagaaagtgcgaggctcaaaagggtgctcggataaggtctaacctgaatttttatgtggttttgtggactgtaggaaaaaaaaactcgataaactcaccgatcaacctggaaatctgataccaattgatgaagctgaggtgcccgatctttcggcgagtagagataattccgatttggcggaagatgacccttgcgatccgactacgacgagcaagcccgaggcgccaatgcaatcgctgaaccaactccctgtggttaccgaccttgctgatgcgagatcggcctgatcgcgaagatcgtttcctgtgcg

SEQ ID NO: 697 - DNA, 880 bp, Zea mays
  VARIATION (15)..(101): /replace="c" or "g" or "t"
  misc_feature (15)..(101): /note="Nucleotides given in the sequence have no preference with respect to those in the annotations for said positions"
  source: /note="Zea mays BAC clone full insert sequence contig bacm2.pk023.e24.fis1"
ggcatacgcactagaaaaaaaaaaaaaaaaaaaaaaaaaaaaaaaaaaaaaaaaaaaaaaaaaaaaaaaaaaaaaaaaaaaaaaaaaaaaaaaaaaaaaaaccagaaccatttctttgtttttcgcaacgaacatgtccaatccactactttaggtcccaaactcatgtttgggttggtttcgcgcaatttcgttgtcacacgtcacacattcggaaaacggttgtcgggtgcatacaaagcacgagtttttgccaccggaaccatttcttcgtttttcgcaacgaacatgcccaatctactactttaggtccaaaactcatgtttggggtggtttcgcgcaatttcgttgtcgcacgtcacccattccgaaaacggttttcggggtgcatacaaagcacgagtttttgccaccggaaccatttcttcgtttttcgcaacgaacatgcccaatcccctactttaggtccaaaaaacccgtttggggtgggttcgcgcaattttgttgtctcacatcaccccttctcaaaacgggggtcggggggtgaacaaaaaacaattttttgccccccaaaacctttttcttcttttctcacaaaaaatgccccaaccccacaatttggtgtacaacactcgtgtggggtgtgttctcgcacattttctgtgccacacctccccctctcaaaacgcgggtgtgggtgtgcacacaccccaaaatttttccccacgaaacctttttttctcttttttcaaaaaaaaatgcgcaatatcaactatttaaggcgaaaactctcgtgtgtgtggtgtttccgcactttctctctgacacactcccccactctcaaaaaaggtgtcgagtggcaaccaactcaagttttttt

SEQ ID NO: 698 - DNA, 884 bp, Zea mays
  VARIATION (12)..(103): /replace="c" or "g" or "t"
  misc_feature (12)..(103): /note="Nucleotides given in the sequence have no preference with respect to those in the annotations for said positions"
  VARIATION (316)..(884): /replace="c" or "g" or "t"
  misc_feature (316)..(884): /note="Nucleotides given in the sequence have no preference with respect to those in the annotations for said positions"
  source: /note="Zea mays BAC clone full insert sequence contig bacm2.pk023.e24.fis2"
cccgtaacgcaaaaaaaaaaaaaaaaaaaaaaaaaaaaaaaaaaaaaaaaaaaaaaaaaaaaaaaaaaaaaaaaaaaaaaaaaaaaaaaaaaaaaaaaaaaaaaataaaaggatgcacacatagtgacatgctaatcactataatgtgggcatcaaagttgtgtgttatgtgtaattactagtctgcagcatttggctaccttaagagagtcatagttatagctcgagcggccagcttgatatcgaattcgagccaatatgcgagaacacccgagaaaattcatcgatgatggttgagatgtgtataagagacagaaaaaaaaaaaaaaaaaaaaaaaaaaaaaaaaaaaaaaaaaaaaaaaaaaaaaaaaaaaaaaaaaaaaaaaaaaaaaaaaaaaaaaaaaaaaaaaaaaaaaaaaaaaaaaaaaaaaaaaaaaaaaaaaaaaaaaaaaaaaaaaaaaaaaaaaaaaaaaaaaaaaaaaaaaaaaaaaaaaaaaaaaaaaaaaaaaaaaaaaaaaaaaaaaaaaaaaaaaaaaaaaaaaaaaaaaaaaaaaaaaaaaaaaaaaaaaaaaaaaaaaaaaaaaaaaaaaaaaaaaaaaaaaaaaaaaaaaaaaaaaaaaaaaaaaaaaaaaaaaaaaaaaaaaaaaaaaaaaaaaaaaaaaaaaaaaaaaaaaaaaaaaaaaaaaaaaaaaaaaaaaaaaaaaaaaaaaaaaaaaaaaaaaaaaaaaaaaaaaaaaaaaaaaaaaaaaaaaaaaaaaaaaaaaaaaaaaaaaaaaaaaaaaaaaaaaaaaaaaaaaaaaaaaaaaaaaaaaaaaaaaaaaaaaaaaaaaaaaaaaaaaaaaaaaaaaaaaaaaaaaaaaaaaaaaaaaaaaaaaaaaaaaaaa

SEQ ID NO: 699 - DNA, 967 bp, Zea mays
  source: /note="Zea mays BAC clone full insert sequence contig bacm2.pk023.e24.fis3"
atatggccacttaacgccaacgccagcagagcactgcccggcggcctttttcccatctctctctctctctctgatggcctgatggggtgtgcatgcctgactgactgatagatagatagatggtcaggtccgtctgatcctcatcggcctagctcaccccacgcgaaaaaagccactgctggctggcgcccagttgcgcttgcaacagtcactttagcgagccccgtccttgcgtttgccctcctcgctctgcccctgccgccgctgcgtggtggtgctggtgcatgaggcaggcgtcgtactagtgcatgcaatgcaaccgtaggagtgcgttgcgtaccctggtctgtccctgcggcctggcctgccgcccttgttcgttgcggatgcggggggtgccgggtgggtactgtactgtactactgggtagagagaagtagatatagatagatagagagagagaggtcggtcaccccgggcgcgggacacagcctctgcgaaaaagcgatccatgtcgcgcctagctttgacccggaacggatcccccaaccaggaaccagcagagcaggagggccaggccaccacctctcgccattccattcccggtcctagctagtcctgttctgttcctgtagcagtagctacggtactacgagtcctcctcgacgtcccaggcactactccactccacgcagcagcaggcagcgaacatctctcgaccagatgcatacaagctacaccctcctcggctccgatcctacccatgccggcccaggcggcctataaaagcgcacccccggcccgtcttcctcccactgcatgcccattgcccccccggccttcgccgtgccaacgacacacctcatcaccggccggaacattccacgaccgaagaaaccagtccctagctagtccacgcacgaccaacaaggcaggcgagcgacgacagtccaagcctccaaccatg

SEQ ID NO: 700 - DNA, 154 bp, Zea mays
  source: /note="Zea mays BAC clone full insert sequence contig bacm2.pk023.e24.fis4"
gcttggcggcggcaacacacagcgactggaggctctggtggagcggctcatcgacgacaaccgccggcaggccggcgagatcgcgcggctcaacgcccgtatggcgcgcgtgatggaaaagtgggacggcgacggcatgccgggcgcgcgggag

SEQ ID NO: 701 - DNA, 1828 bp, Zea mays
  source: /note="Zea mays BAC clone full insert sequence contig bacm2.pk023.e24.fis5"
ggttccggtggcaaaaactcgtgcgttgtatgcaccccgacacccgttttcggaatgggtgacgtgcgacaacgaaattgcgcgaaaccacaccaaacatgagttttggacctaaagtagtggattgggcatgttcgttgcgaaaaacgaagaaatggttccggtggcaaaaactcgtgctttgtatgcaccccgacacccgttttcggaatgggtgacgtgcgacaacgaaattgcgcgaaaccacaccaaacatgagttttggacctaaagtagtggattgggcatgttcgttgcgaaaaacgaaaaaatggttccggtggcaaaaactcgtgctttgtatgcaccccaaaaaccgttttcggaatgggtgacgtgcgacaacgaaattgcgcgaaaccaccccaaacatgatttttggacctaaagtagtaaattgggcatgttcgttgcaaaaaacaaaaaaatggttccggtggcaaaaactcgtgctttgtatgcacccgacaaccgttttccgaatgtgtgacgtgtgacaacgaaattgcgcgaaaccaacccaaacatgagtttgggacctaaagtagtggattggacatgttcgttgcgaaaaacaaagaaatggttctggtggcaaaaactcgtgctcttatgcaccccgacacccgttttcggaatgggtgacgtgcgacaacgaaattgcgcgaaaccaccccaaacatgagttttggacctaaagtagtagattgggcatgttcgttgcgaaaaacgaagaaatggttccggtggcaaaaactcgtgctttgtatgtacccgacacccgttttcggaatgggtgacgtgcgacaacgaaattgcgcgaaaccaacccaaacatgagttttggacctaaagtagtggattgggcatgttcgttgcgaaaaacgaagaaatggttccggtggcaaaaactcgtgctttgtatgcacccgacacccgttttcggaatgggtgacgtgcggcaacgaaattgcgcgaaaccacaccaaacaagagttttggacctaaagtagtggattgggcatgttcgttgcgaaaaacgaagaaatggttccggtggcaaaaactcgtgctttgtatgcaccccgacacccgttttcggaatgggtgacgtgcggcaacgaaattgcgcgaaaccaccccaaacatgagttttggacctaaagtagtggattgggcatgttcgttgcgaaaaacgaagaaatggttccggtggcaaaaactcgtgctttgtatgcacccgacacccgttttcggaatgggtgacgtgcgacaacgaaattgcgcgaaaccaccccaaacatgagttttggacctaaagtagtggattgggcatgttcgttgcgaaaaacgaagaaatggttccggtggcaaaaactcgtgctttgtatgcacccgacacccgtttttggaatgggtgacgtgcgacaacgaaattgcgcgaaaccaccccaaacatgagttttggacctaaagtagtggattgggcatgttcgttgcgaaaaacgaagaaatggttccggtggcaaaaactcgtgctttgtatgcaccccgacacccgttttcggaatgggtgacgtgcgacaacgaaattgcgcaaaaccaccccaaacatgagttttggacctaaagtagtggattgggcatgttcgttgcgaaaaacgaagaaatggttccggtggcaaaaactcgtgctttgtatgcacccgacacccgttttcggaatgggtgacgcgggacaacgaaaccgcgcgaaaccaccccaaacatgagttttggacctaaagta

SEQ ID NO: 702 - DNA, 2798 bp, Zea mays
  source: /note="Zea mays BAC clone full insert sequence contig bacm2.pk023.e24.fis6"
ctgcagcaagcaccatattaaatggagcatatctttcatctcccaagattgtttagtgcaaataagtacttgttggaaagctctcttcgtctactttctggcggctgaagaatcaatgggagaaaccaaacgacacgtccagaaactgtcgagagagcttcgttctccaccagaacttctttctattcctctatttaagcaactagcagccaccaaagaacttgggttttgtttgatgtaagtttagcctttgctacttccttgtaaacgcgtgtgtcggctagaccacccgaatacttgaaatgggaccccaactttatcagatccgtgcgtgtttgcttgttatcttgttcttgcttgttctcgattgcttgcaggttcaaggctgttcttggcacggcaagagcagcaacaacaggagccggtgtaactatcgctaaggcgcagcacccttgtggttgttgtagtcggatagcacaacgtcgacctccaccccaaatcgtagttatcaggagacggtgtacctgtcgctcaaggcgccacaccatcttggttgtggtagtcgggcagccaacgtcgttctccaacaagttttccacctccatcatctctcatcgaaagatcgggcacccttctacccgttgggtttatcaccaccagaaccatttcttcgtttttcgcaacgaacatgcccaatccactactttaggtccaaaactcatgtttggtgtggtttcgcgcaatttcgttgccgcacgtcacccattccgaaaacgggtgtcgggtgcatacaaagcacgagtttttgctaccggaaccatttcttcgtttttcgcaacgaacatgcccaatccactactttaggtccaaaactcatgtttggtgtggtttcgcgcaatttcgttgccgcacgtcacccattccgaaaacgggtgtcgggtgcatacaaagcacgagtttttgccaccggaaccatttcttcgtttttcgcaacgaacatgcccaatccactactttaggtccaaaactcatgtttggtgtggtttcgcgcaatttcgttgccgcacgtcacccattccgaaaacgggtgtcgggtgcgaacaaagcacgagtttttgccaccggaaccatttcttcgtttttcgcaacgaacatgcccaatccactactttaggtccaaaactcatgtttggtgtggtttcgcgcaatttcgttgtcacacgtcacccattccgaaaacgggtgtcggggtgcatacaaagcacgagtttttgccaccggaaccatttcttcgtttttcgcaacgaacatgcccaatccactactttaggtccaaaactcatgtttggtgtggtttcgcgcaatttcgttgccgcacgtcacccattccgaaaacgggtgtcgggtgcatacaaagcacgagtttttcctaccggaaccatttcttcgtttttcgcaacgaacatacccaatccactactttaggtccaaaactcttgtttggtgtggtttcgcgcaatttcgttgccgcacgtcacccattccgaaaacgggtgtcgggtgcgtacaaagcacgagtttttgccaccggaaccatttcttcgtttttcgcaacgaacatgcccaatccactactttaggtccaaaactcatgtttggggtggtttcacgcaatttcgtcctcgcacgtcacccattccgaaaacgggtgtcgggtgcatacaaagcacgagtttttgccaccggaaccatttcttcgtttttcgcaacgaacatgcccaatccactactttaggtccaaaactcatgtttggtgtggtttcgcgcaatttcgttgtcacacgtcacccattccgaaaacgggtgtcggggtgcatacaaagcacgagtttttgccaccggaaccatttcttcgtttttcgcaacgaacatgcccaatccactactttaggtccaaaactcttgtttcgtgtggtttcgcgcaatttcgttgccgcacgtcacccattccgaaaacgggtgtcgggtgcatacaaagcacgagtttttgccaccggaaccatttcttcgtttttcgcaacgaacatgcccaatccactactttaggtccaaaactcatgtttgggttggtttcgcgcaatttcgttgtcgcacgtcacccattccgaaaacgggtgtcgggtacatacaaagcacgagtttttgccaccggaaccatttcttcgtttttcgcaacgaacatgcccaatcaactactttatgtccaaaaatcatgtttggggtggtttcgcgcaatttctttgtctcacgtcacccattcctaaaaaaggtggcggggtggataaaaacaagaattttttccacccgaaccaattctttgtttttttcaaccaacaagcccaacccatcaatttatgtccgtaactcaagtttggtttggtttcgctcactttccttgtctcacgtcacccattccgaaaaaaaatgtcgggtgggtaccaaacaagaatttttttctgcccaaccatttctttcttttttttttccaaccaacccaacccatcaccttatttccgaaacacaagtttggtttgggttgtctccatctctttgtctcacgccacccactcatcaaaaaaatgggtggggggcgtacaaacaaaaaattatttctcacccacaaaaacttttctttttttttctacaaacaaaccaaaccaatcaattatttttgaacaaaaaaagttggggggggggggtccccaagtttatttggtggcacgcaccccatccttaaa

SEQ ID NO: 703 - DNA, 3708 bp, Zea mays
  source: /note="Zea mays BAC clone full insert sequence contig bacm2.pk023.e24.fis7"
gccaccggaaccatttcttcgtttttcgcaacgaacatgcccaatccacaactttaggtccaacactcatgtttggggtggttccgcgcaatttcgttgtcgcacgtcacccattccgaaaacggttgtcgggtgcatacaaagcacgagtttttgccaccggaaccatttcttcgtttttcgcaacgaacatgcccaatccactactttaggtccaaaactcatgtttggggtggtttcgcgcaatttcgttgtcgcaagtcacccattccgaaaacgggtgtcggggtgcatacaaagcacaagtttttgccaccggaaccatttcttcttttttcccaacgaacatgcccaatccactactttaggtccaaaactcatgtttgggttggtttcgcgcggtttcgttgtcccgcgtcacccattccgaaaacgggtgtcgggtgcatacaaagcacgagtttttgccaccggaaccatttcttcgtttttcgcaacgaacatgcccaatccactactttaggtccaaaactcatgtttggggtggtttcgcgcaatttcgttgtcgcacgtcacccattccgaaaacgggtgtcggggtgcatacaaaccacaattttttgccaccgaaaccatttcttcttttttcgcaacaaacatgcccaacccactactaatttacgtccaaaactcttggggggggtggtttcgcgctatttcgttgtcgcacgtcacccattccaaagatgggtgtctggtgcaaaccaagcattattttttgccaccggaattttttctttttttttcgcaacgaacatgccccatccactactttacgtccaaaactcatgtttggggtggtttcgcgcaatttcgttgtcgcacgtcacccattccgaaaacggttgtcgggtgcatacaaagcacgagtttttgccaccggaaccatttcttcgtttttcgcaacgaacatgcccaatccactactttaggtccaaaactcatgtttggggtggtttcgcgcaatttcgttgtcgcaagtcacccattccgaaaacgggtgtcgggtgcatacaaagcacgagtttttgccaccggaaccatttcttcgtttttcgcaacgaacatgcccaatccactactttaggtccaaactcatgtttggggtggtttcgcgcaatttcgtcgtcgcacgtcaccctttccgaaaacgggtgtcgggtgcatacaaagcacgagtttttgccaccggaaccatttcatcgtttttcgcaacgaacatgcccaatccactactttaagtccaaaactcatgtttggggtggtttcgcgcaatttcgtcgtcgcacgtcacccattccgaaaacgggtgtcgggtgcatacaaagcacgagtttttgccactggaaccatttcttcgtttttcgcaacgaacatgcccaatccactactttaggtccaaaactcatgtttggggtggttttgcgcaatttcgttgtcgcacgtcacccattccgaaaacgggtgtcggggtgcatacaaagcacgagtttttgccaccggaaccatttcttcgtttttcgcaacgaacatgcccaatccactactttaggtccaaaactcatgtttggggtggtttcgcgcaatttcgttgtcgcacgtcacccattccgaaaacgggtgtcaggtgcatacaaagcacgagtttttgccaccggaaccatttcttcgtttttcgcaacgaacatgcccaatccactactttaggtccaaaactcatgtttggggtggtttcgcgcaatttcgttgtcgcacgtcacccattccgaaaacgggtgtcggggtgcatacaaagcacgagtttttgccaccggaaccatttcttcgtttttcccaacgaacatgcccaatccactactttaggtccaaaactcatgtttggggtggtttcgcgtaatttcgttgtcgcacgtcacccattccgaaaacgggtgtcgggtgcatacaaagcacgagtttttgccaccggaaccatttcttcgtttttcgcaacgaacatgcccaatccactactttaggtccgaaactcatgtttgggttggtttcgcgcaatttcgttgccgcacgtcacccattccgaaaacgggtgtcgggtgcatataaagcacgagtttttgccaccggaaccatttcttcatttttcgcaacgaacatgcctaatccactactttaggtccaaaactcatgtttggggtggtttcgcgcaatttcgtcgtcgcacgtcacccattccgaaaacgggtgtcgggtgcatacaaagcacgagtttttgccaccggaaccatttcttcgtttttcgcaacgaacatgcccaatccactactttaggtccaaaactcatgtttggggtggtttcgcgcaatttcgttgtcgcacgtcacccattccgaaaacgggtgtcggggtgcatacaaagcacgagtttttgccaccggaaccatttcttcgtttttcgcaacgaacatgcccaatccactactttaggtccaaaactcatgtttggggtggtttcgcgtaatttcgttgtcgcacgtcacccattccgaaaacgggtgtcgggtgcatacaaagcacgagtttttgccaccggaaccatttcttcgtttttcgcaacgaacatgtccaatccactactttaggtccaaaactcatgtttgggttggtttcgcgcaatttcgttgccgcacgtcacccattccgaaaacgggtgtcgggtgcatataaagcacgagtttttgccaccggaaccatttcttcgtttttcgcaacgaacatgcctaatccactactttaggtccaaaactcatgtttggggtggttttgcgcaatttcgtcgtcgcacgtcacccattccgaaaacgggtgtcgggtgcatacaaagcacgagtttttgccaccggaaccatttcttcgtttttcgcaacgaacatgcccaatccactactttaggtccaaactcatgtttggggtggtttcgcgcaatttcgtcgtcgcacgtcaccctttccgaaaacggttgtcgggtgcatacaaagcatgagtttttgccaccggaatcatttcttcgtttttcgcaacgaacatgcccaatccactactttaggtccaaaactcatgtttggggtggtttcgcgcaatttcgttgtcgcacgtcacccattccgaaaacgggtgtcggggtgcatacaaagcacgagtttttgccaccggaaccatttcttcgtttttcgcaacgaacatgcccaatccactactttaggtccaaaactcatgtttgggttggtttcgcgcaatttcgttgtcgcaagtcacccattccgaaaacgggtgtcgggtgcatacaaagcacgagtttttgccaccggaaccatttcttcgtatttcgcaacaaacatgcccaatccactactttaggtccaaactcatgttgataaagctgaggtgcccgatctctcggcgagtagagataattccgatttggcggaagatgacccttgcgatccgactacgacgagcaagcccgaggcgccaatgcaatcgctgaaccaactccctgtggttaccgaccttgctgatgcgagatcggcctgatcacgaagatcgtttcctgtgcgcaatcgaagacgaacaagaataagatgcgagcaa

SEQ ID NO: 704 - DNA, 8516 bp, Zea mays
  VARIATION (3690)..(3784): /replace="c" or "g" or "t"
  misc_feature (3690)..(3784): /note="Nucleotides given in the sequence have no preference with respect to those in the annotations for said positions"
  source: /note="Zea mays BAC clone full insert sequence contig bacm2.pk023.e24.fis8"
ccctaaaccctaaaccctaaaccctaaaccctaaaccctaaaccctaaaccctaaaccctaaaccctaaaccctaaaccctaaaccctaaaccctaaaccctaaaccctaaaccctaaaccctaaaccctaaaccctaaaccctaaaccctaaaccctaaaccctaaaccctaaaccctaaaccctaaaccctaagggcgaattcgatatcaagctggccgctcgagctataactatgactctcttaaggtagccaaatgctgcagactagtaattacacataacacacaactttgatgcccacattatagtgattagcatgtcactatgtgtgcatccttttatttcatacattaattaagttggccaatccagaagatggacaagtctaggttgcggccggccgctacaggaacaggtggtggcggccctcggtgcgctcgtactgctccacgatggtgtagtcctcgttgtgggaggtgatgtccagcttggcgtccacgtagtagtagccgggcagctgcacgggcttcttggccatgtagatggacttgaactccaccaggtagtggccgccgtccttcagcttcagggccttgtgggtctcgcccttcagcacgccgtcgcgggggtacaggcgctcggtggaggcctcccagcccatggtcttcttctgcatcacggggccgtcggaggggaagttcacgccgatgaacttcaccttgtagatgaagcagccgtcctgcagggaggagtcctgggtcacggtcgccacgccgccgtcctcgaagttcatcacgcgctcccacttgaagccctcggggaaggacagcttcttgtagtcggggatgtcggcggggtgcttcacgtacaccttggagccgtactggaactggggggacaggatgtcccaggcgaagggcagggggccgcccttggtcaccttcagcttcacggtgttgtggccctcgtaggggcggccctcgccctcgccctcgatctcgaactcgtggccgttcacggtgccctccatgcgcaccttgaagcgcatgaactcggtgatgacgttctcggaggaggccatggtggcgaccggtggatccatctgcgtcaccgggcgcaccgggcgcggcggggccggcagctcgaagtcgcgctgccagaagccgacgtcgtgccagccgccgtgcttgtagccggcggcgcggagggtgccgcgggcggtgtagccgagggcctcgtggaggcgcacggacgggtcgttcgggaggccgatcacggccaccacggacttgaagccctgggcctccatgctcttgaggaggtgggtgtagagggtggagccgaggccgaggcgctggtggcggtgggacacgtacacggtggactccacggtccagtcgtaggcgttgcgggccttccacgggccggcgtaggcgatgccggccaccacgccctccacctcggccacgagccacgggtagcggtcctggaggcgctccaggtcgtcgatccactcctgcggggtctgcggctcggtgcggaagttcacggtggaggtctcgatgtagtggttcacgatgtcgcacacggcggccatgtcggcggcggtggccgggcggatctcgacggggcggcgctcgggggacatggtgtcgtgtggatccccggcggtcgacctgcagaagtaacaccaaacaacagggtgagcatcgacaaaagaaacagtaccaagcaaataaatagcgtatgaaggcagggctaaaaaaatccacatatagctgctgcatatgccatcatccaagtatatcaagatcaaaataattataaaacatacttgtttattataatagataggtactcaaggttagagcatatgaatagatgctgcatatgccatcatgtatatgcatcagtaaaacccacatcaacatgtatacctatcctagatcgatatttccatccatcttaaactcgtaactatgaagatgtatgacacacacatacagttccaaaattaataaatacaccaggtagtttgaaacagtattctactccgatctagaacgaatgaacgaccgcccaaccacaccacatcatcacaaccaagcgaacaaaaagcatctctgtatatgcatcagtaaaacccgcatcaacatgtatacctatcctagatcgatatttccatccatcatcttcaattcgtaactatgaatatgtatggcacacacatacagatccaaaattaataaatccaccaggtagtttgaaacagaattctactccgatctagaacgaccgcccaaccagaccacatcatcacaaccaagacaaaaaaaagcatgaaaagatgacccgacaaacaagtgcacggcatatattgaaataaaggaaaagggcaaaccaaaccctatgcaacgaaacaaaaaaaatcatgaaatcgatcccgtctgcggaacggctagagccatcccaggattccccaaagagaaacactggcaagttagcaatcagaacgtgtctgacgtacaggtcgcatccgtgtacgaacgctagcagcacggatctaacacaaacacggatctaacacaaacatgaacagaagtagaactaccgggccctaaccatggaccggaacgccgatctagagaaggtagagagggggggggggggaggacgagcggcgtaccttgaagcggaggtgccgacgggtggatttgggggagatctggttgtgtgtgtgtgcgctccgaacaacacgaggttggggaaagagggtgtggagggggtgtctatttattacggcgggcgaggaagggaaagcgaaggagcggtgggaaaggaatcccccgtagctgccggtgccgtgagaggaggaggaggccgcctgccgtgccggctcacgtctgccgctccgccacgcaatttctggatgccgacagcggagcaagtccaacggtggagcggaactctcgagaggggtccagaggcagcgacagagatgccgtgccgtctgcttcgcttggcccgacgcgacgctgctggttcgctggttggtgtccgttagactcgtcgacggcgtttaacaggctggcattatctactcgaaacaagaaaaatgtttccttagtttttttaatttcttaaagggtatttgtttaatttttagtcactttattttattctattttatatctaaattattaaataaaaaaactaaaatagagttttagttttcttaatttagaggctaaaatagaataaaatagatgtactaaaaaaattagtctataaaaaccattaaccctaaaccctaaatggatgtactaataaaatggatgaagtattatataggtgaagctatttgcaaaaaaaaaggagaacacatgcacactaaaaagataaaactgtagagtcctgttgtcaaaatactcaattgtcctttagaccatgtctaactgttcatttatatgattctctaaaacactgatattattgtagtactatagattatattattcgtagagtaaagtttaaatatatgtataaagatagataaactgcacttcaaacaagtgtgacaaaaaaaatatgtggtaattttttataacttagacatgcaatgctcattatctctagagaggggcacgaccgggtcacgctgcactgcaggcatgcaagctgatctgaaaaaaaaaaaaaaaaaaaaaaaaaaaaaaaaaaaaaaaaaaaaaaaaaaaaaaaaaaaaaaaaaaaaaaaaaaaaaaaaaaaaaaaaaaaaaaatggccgaagactactgagtgtcttcttacgatgaagacatgaacgtgtcttcaactagaggcgcgcctgacttaattaatgagcggccggccgcagttccatcttggtggacaaaggtgacccggaccgaagctccacgagaggaaccgttgattcacacaattggtcatcgcgcttggttgaaaagccagtggcgcgaagctaccgtgtgccggattatgactgaacgcctctaagtcagaatccaagctagcaaccggcgcctctgctcgccgcccgccccgacccacgttagggcgttcgcgccccaagggcccgtgccattggctcagcccgcccggtcgacgcgccgcggcgggccgcctcgaagctcccttcccaacgggcggcgtgctgaatcctttgcagacgacttaaaacgcgacggggcattgtaagtggcagagtggccttgctgccatgatccactgagatccagccccgcgtcgcacggattcgtccctccccccactctacacagcgcccagcgactaggtttcgaacccacgggagaggggcaccgatcttccgaacggaaacgtccaaggcgcagcgtggcaagaggccgaaaaccgccgtgagttcgtgcacgaccacaagaaaagctaagtcccagcgtgtggaaagaaaccgaagctcctacgtatgccttgggtgaagggcacgatggaacgttggcgatgggcggcagggctgttcggccacgcgtctaggctgaaaacgaggggttcgccatggcgcgcgggccgcaaacggcgaccggggcacgacctcgaaaataggctaagtccaagcgtgtggaatggaaagacaccgaagctaaggtgtatgtatgtcttgagtgaagggcacggtggaacggagggaaaacgacacggaggcgcgcgacgacgggcggcatggctgttcggccttgcgtttgggccgaaaacgatgggttcgccatggcgcacgggccgaaaaatgaggttcaggcacgaccccgaaaataagctaagtccaagcgtgtggaaaggcaccgaagctaatatgtatgtcttgggtgaagggcacggaggaacagagggaaaacggcacggaggcgcgcggcgacgggcggcagggctgttcggccttgcgtctgggctgaaaacgaggggttcgccatggcgcacgggccgaaaactgaggctcgggcatgacctcgaaaataagctaagtccaagcgtgtggaatggaaagacaccgaagctaaggtgtttgtatgtcttgagtgaagggcacggtggaacggagggaaaacgacacggaggcacgcgacgacgggcggcatggctgttcggccttgcgtcctggctgaaaacgaggtgttcgccatggcgcacgggccgaaaactgaggctcaggcacgaactcgaaaataagctaagtccaagcgtgtggaaagacacggaacctaaagtgtatgtctttggtgaagggcacagtggaacggagggaaaacgacacggaggcacgcgacgaactgaggctccggcacggaggcgcacggcgacgggcggcagggatgttcgtccttgtgtttgggctgaaaacgaggtgttcgccatggcgcgtggtccgaaaacaacggttcggccacggtccgaaaacgggctaagtcccagcgtttggaaagacaccgaacctaaagtgcatgtctggagtgaaggtcaaggtggaacggagggaaaacgggaggaggtgcgcggcgacgggcggcatggctgttcggccttgcgtttgggctgaaaacgagggtttcgccatggcgcgcgggccgaaaacggcggctggggcacggcctcggaaataagctaagtccaagcgtgtggaaagacaccgaagctaatgtgtatgtcttgggtgaagggcacggtggaacggagggaaaacgacacggaggcgcgcggcgacgggcggcatggctgttcggccttgcgtttgggctgaaaacgagggtttcgccatggcgcgtgggccgaaaacagcggctggggcacggcctcggaaataagctaagtccaagcgtgtggaaagacaccgaagctaatgtgtatgtcttgggtgaagggcaagatggaacggagggaaaacgacacggaggcccgcggcgacgggcggcagggctgttcggcaatgcgtctgggctaaaaacaggtggttcgccatggcgcgcgggccggaaatggtggctgtggcacgaacccgaaaataaactaagtccaagcatgtggaaacacaccgaacctaaagtggatgtctttggtgaagggcacggtggaacggagggaaaacgacacggaggcacgcggcaacgggcggtagggctgttcggccttgcgtatgggctgaaaacgaggggttcgccatggcgcacgggccgaaatcggaggctcgggcacgacctccaaaattagctaagtccaagcttgtggaaagacaccgaacctaaagtgcatgtcttaagtgaagggcaaggtggaacggagggaaaacgggagcaggcgcgtggcgacgggcggcagggctgttcggccttgcgtttgggctgaaaacgaggggttcgccatggcgcacgggccgaaaactgaggctagggcacgaccccgaaaataagctaagtccaagcatgtggaaagacaccgaacctaaagtgcatgtcttgagtgaagggcacggtggaacggagggaaaacgggaggaggcgcgctgccacgggcggcagggctgttcggccttgcgtttgggctgaaaacgaggtgttcgccatggcgcgcgggccgaaaactgaggctcgggcacgaccccgaaaataagctaagtccaagcatgtggaaagacaccgaacctaaagtgcatgtcttgagtgaagggcaaggtggaacggagggaaaacgggaggaggcgcgctgccacgggcggcagggctgttcggccttgcgtttgggctgaaaacgaggtgttcgccatggcgcgcgggctgaaaactgaggttcggccacggccgcgaaaacgggctaagtccaagcgtgtggaaagacaccgaacctaaagtgcatgtcttgagtgaagggcaaggtggaacggagggaaaacgggaggaggcgcgctgccacgggcggcagggctgttcggccttgcgtttgggctgaaaacgaggtgttcgccatggcgcgcgggctgaaaactgaggttcggccacggccgcgaaaacgggctaagtccaagcgtgtggaaagacaccgaacctaaagtgcatgtcttgagtgaagggcaaggtggaacggagggaaaacgggaggaggcgcgctgccacgggcggcagggctgttcggccttgcgtttgggctgaaaacgaggtgttcgccatggcgcgcgggctgataactgaggttcggccacggccgcaaaaacgggctaagtccaagcatgtggaaagacaccgaacctaaagtgcatgtcttgagtgaagggcaaggtggaacggagggaaaacgggaggaggcgcgctgccacaggcggcagggctgttcggccttgcgtttgggctgaaaacgaggggttcgccatggcgcacgggccgaaaactgaggctcgggcacgaccccgaaaataagctaagtccaagcatgtggaaagacaccgaacctaaagtgcatgtcttgagtgaagggcacggtggaacggagggaaaacggctcggaggcgcgctgccacgggtggcagggctgttcggccttgcgtttgggctgaaaacgaggggttcgccatggcgcacgggccaaaaacggattttcggccacggccgcaaaaacgggcacgtggaagggcacgggaccctcccgtggtccccccgcgtgagacatcgaagttcgggtcgacccgtgagggaaaacgggtcacgctagcgaaacccctgattctgagcaaaaacgttgtgtccggccatcttagatgggtttcgtggcgtccagggaaaataccctggttttctgaaggctgaactccccgaagtcctgggagggggtatgcccctcaggtatagtagggggtagggaactcgtgcagccgaaacccgggcggaacgctgctgaaaccatagcgtttccagcgtctcctccaggtctcctcggccgagccccgcaccccctcgcggcctagccgtggccggtcagcaccctaccgcgcccagctccagctggcgctgttggctgcctggccggccatggttcggccgtgacgcagccacgaccggctatggctggctagcgccggccagacgccctggacgagtggctgcactgtgggatggcccgttgctcgatgcgttttccatttctcccgtgctcggtggaccttcggtcgccgtcctcgcaagtagacccgccgcgcccagcgcggagggatgctttggatggctcgaccgtagcggctacgctggcgcatgagttgtcttggacccgtgactgcttggaggacccccgctgccgtgcagccgactccccggcgcccgtgtcccatcgttcgtgcgggcatcctgtgcctgctgcattgagaagtgcttgcgtgctgctacacgtcccacgggaagccgtggggatcctctagagcttgccaacgactacgcactagccaacaagagcttcagggttgagatgtgtataagagacag

SEQ ID NO: 705 - DNA, 22627 bp, Zea mays
  source: /note="Zea mays BAC clone full insert sequence contig bacm2.pk023.e24.fis9"
atggttgctgcatttgggtcgagttgctggtctaaagttttcttaccgctagagtttcgagttcgcgccaccttgtttcaatcaccagtttagacctcttgctgcaattcaaccaaaaagaagagaaagcaaaaggcgagtgcataaaaaaagccgcactaatcagcaaaacaaaaaaagacacgtgcaaaaaaagagagaaaaaccagttctgaattttggtagataaaatttgtaagtgcaacaaaacaaaaggcagtttgtgtgccttctttttatagtttcataaatcagattgctgttctcagcttttggtgatactatttgtgtaacggctcgcgtctctattacggtttggactaggaccagcacaacaccattgtggaacgtttattcaacttgttgtggctaatgtggtactagctattccttctattgttttatcagccacctataaatccacaaatttttctacaacaccacgaggttgtgctagctgccaccgttgttgttgttcttgctgtttgccggcacctcctgtattgcgtggtgagaatttgcttaactagtttgagaatgagagattacaacaatgattccttgtagtttataggatcaaagatattttttattgttttcttgtctttactaaacatggcaggtgatatgaagatttttgagacaaccaaacattatattcaaggcatcattcaacacttgccttcatatgccggtaaattcgatcctcatgcatacattgattgggagctcaaggtagataaggaatttgatgagcatgatctatctcaaaaacaaaagatttatattgcctctaatgtgttaactgagcatgcattgatggaatggaaatacatttgtaggcacaacaaagttccacagtcttggaaagacttcaaacttcattttagggatgcattcattcctgcatactatgctgattatttgctttctaaattagacaccttaaagcagggtgctaggactgtaaaagaatattatcatgattttaaaatttgtaccatgtttgctggtttagatgaatgcatggaagatgtaatgacaaggtttacaaacggactcaattctgaaattcatactatggtcatgcatgaaacttatggacacctttctcacttgtttttgcttgcatgtaaagctgaaaaagagatcgtgttatacaattatacatgcaccgaacatgcgacacatagttcctcttttttgtctcctcaacatgctgaacaagagcacaaaatagagaaaattgatgttgtttttccgtcatcacaagaagtattgttggctgacccttgtgatagcgaagagttggtggataattcacttttattcaggaaacaactagtgaatgaacatgttacatctgatattgaaccaaacattttggctaaaaaggaacatgtcatttgtattgcaaacgaaactgaagaaataaatttgctctcttctttaaatacttggggctatattgagtttgatgatctttttgagctcggtaatttggaaaatattttatttgctagatcaactataccttgtccttctcatgttatattttacattgctggcaagtacaacaacataggacaatttcttgtgcatagaatttttatttcatctagatatgttgtttcttcactttgtgcaaataagatattggtatgttctcaagaagaaaagaatctcttgtttccatgtactttagtagaagtttcaagtttatatttgaaagacattgataaaagcttagtcatcaacatcaatcatgatgcaaaaccgaggacggtttgctgtcaagaaggggagaatgatgagaacataacccgcacagatatggccatgttaatggctcctgctacaaagacattgaggaacaaagaagttgattggggtccaagtaatgatatttccaacatttccaaccaagcaagcacatcatcaaatttaaagatatacttgggtgaggagtgcacactagagtcgaggacgactctattacaagaaggggaggatgatgaggacatcactgccatcaatacaaccacaccagcgacccccttcaccatttaatcatggaccagtgaaacgagtccgtgcacgtaaatttaattatcaggtgaactcgttccttgttgttgaagctaatcattccttaaatgaggtattaataccttgtgattactttattatgctaaggtgtttgggaggtaaaccatctagaatttgagaaggcaacaaggcaataaaagctgctccacttgaagggatttcgtaactgcagcaagtgcaagttgaagaggtcatatctttcaactcccaaggccaatgaaggcaaataagcacttgatggaaagcactcttcgtctacttcttggtggagaaagaatcaattagagataccaaatgaggcgtccagaaactgtcgagagaacttcttgactccaccagtccgagggaattcgtaactgcagcaagcaccatattaaatggagcatatctttcatctcccaaggttgtttagtgcaaataagtacttgttggaaagctctcttcgtctactttctggcggctgaagagtcaatgggagaaaccaaacgacacgtccagaaactgtcgagagagcttcgttctccaccagaacttctttctattcctctatttaagcaactagcagccaccaaagaacttgggtttttgtttgatgtaagtttagcctttgctacttccttgtaaacgcgtgtgtcggctagaccacccggatacttgaaacagaaccccaaatctatcagatccgtgagcgtctgcgttttatcttgttcttgcttgttctcgattgcttgcaggttcaaggttgttcttggcacggcaagagcagcaacaacaggagccggtgtaactatcgctaaggcgcagcacccttgtggttgttgtagtcggatagcacaacgtcgacctccaccccaaatcgtagttatcaggagacggtgtacctgtcgctcaaggcgtcacaccatcttggttgtggtagtcgggcagccaacgtcgttctccaacaagttttccacctccatcatctctcatcgaaagatcgggcacccttctacccgttgggtttatcacgtagttatcaggagacggtgtacctgtcgcacaaggcgccacaccatcttggttgtggtagtcgggcagccaacgtcgttctccaacaagttttccatctccatcatctctcatcgaaagatcgggcacccttctacccgttgggtttatcagtgacgtgcgacaacgaaattgcgcgaaaccaccccaaacatgagttttggacctaaagtagtggattgggcatgttcgttgcgaaaaacgaagaaatggttccggtggcaaaaactcgtgctttgtatgcacccgacacccgttttcggaatgggtgacgcgcgacaacgaaaccgcgcgaaaccaacccaaacatgagttttggacctaaagtagtggattgggcatgttcgttgcgaaaaacgaagaaatggttccggtggcaaaaactcgtgctttgtatgcaccccgacacccgttttcggaatgggtgacttgcgacaacgaaattgcgcgaaaccaccccaaacatgagttttggacctaaagtagtggattgggcatgttcgttgcgaaaaacgaagaaatggttccggtggcaaaaactcgtgctttgtatgcacccgacaaccgttttcggaatgggtgacgtgcgacaacgaaattgcgcgaaaccaccccaaacatgagttttggacctaaagtagtggattgggcatgttcgttgcgaaaaacgaagaaatggttccggtggcaaaaactcgtgctttgtatgcacctgacacccgttttcggaatgggtgacgtgcgacaacgaaattgcgcgaaaccaccccaaacatgagttttggacctaaagtagtggattgggcatgttcgttgcgaaaaacgaagaaatggttccggtggcaaaaactcgtgctttgtatgcaccccgacacccgttttcggaatgggtgacgtgcgacaacgaaattgcacaaaaccaccccaaacatgagttttggacctaaagtagtggattgggcatgttcgttgcgaaaaacgaagaaatggttccagtggcaaaaactcgtgctttgtatgcacccgacacccgttttcggaatgggtgacgtgcgacaacgaaattgcgcgaaaccaccccaaacatgagttttggacctaaagtagtggattgggcatgtttgttgcgaaaaacgaagaaatggttccggtggcaaaaactcgtgctttgtatgcacctcacacccgtttttggaatgggtgacgtgtgacaacgaaattgcgcgaaaccacaccaaacatgagttttggacctaaagtagtggattgggcatgttcgttgcgaaaaacgaagaaatggttccggtggcaaaaactcgtgctttgtatgcacccgtcacccggtttcggaatgggtgacgtgcgacaacgaaattgcgcgaaaccacgccaaacatgagttttggacctaaagtagtggattgggcatgttcgttgcgaaaaacgaagaaatggttccggtggcaaaaactcgtgctttgtacgcacccgacacccgttttcggaatgggtgacgtgcggcaacgaaattgcgcgaaaccacaccaaacaagagttttggacctaaagtagtggattgggcatgttcgttgcgaaaaacgaagaaatggttccggtggcaaaaactcgtgctttgtatgcaccccgacacccgttttcggaatgggtgacgtgcggcaacgaaacagagcgaaaccaccccaaacatgagttttggacctaaagtagtggattgggcatgttcgttgcgaaaaacgaagaaatggttccggtggcaaaaactcgtgctttgtatgcacccgacacccgttttcggaatgggtgacgtgcgacagcgaaattgcgcgaaaccacgccaaacatgagttttcgacctaaagtagtggattgggcatgttcgttgtgaaaaacgaagaaatggttccggtggcaaaaactcgtgcgttgtatgcaccccgacacccgttttcggaatgggtgacgtgcgacaacgaaattgcgcgaaaccacaccaaacatgagttttggacctaaagtagtggattgggcatgttcgttgcgaaaaacgaagaaatggttccggtggcaaaaactcgtgctttgtatgcaccccgacacccgttttcggaatgggtgacgtgcgacaacgaaattgcgcgaaaccacaccaaacatgagttttggacctaaagtagtggattgggcatgttcgttgggaaaaacgaagaaatggttccggtggcaaaaactcgtgctttgtatgcaccccgacacccgttttcggaatgggtgacgtgcgacaacgaaattgcgcgaaaccaccccaaacatgagttttggacctaaagtagtggattgggcatgttcgttgcgaaaaacgaagaaatggttccggtggcaaaaactcgtgctttgtatgcacccgacacccgttttcggaatgggtgacgtgcggcaacgaaattgcgcgaaaccaacccaaacatgagttttggacctaaagtagtggattgggcatgttcgttgcgaaaaacgaagaaatggttccggtggcaaaaactcgtgctttgtatgcacccgacacccgttttcggaatgggttgagtgcggcaaccaaattgcgcgaaaccaacccaaacatgagttttggacataaagtagtggattgggcatgttcgttgcgaaaaacgaagaaatggtctcggtggcaaaaactcgtgctttgtatgcaccccgacaaccgttttcagaatgggtgacgtgcgacaacaaaattgcgcgaaaccaccccaaacatgagttttggacctaaagtagtggattgggcatgttcgttgcgaaaaacgaagaaatggttccggtggcaaaaactcgtgctttgtatgcacccgacacccgttttcgaaatgggtgacgtgcgacaacaaaattgcgcgaaaccacgccaaatatgagttttggacctaaagtagtggattgggcatgtttgttgcgaaaaacgaagaaatggttccggtggcaaaaactcgtgctttgtatgcacccgacacccgttttcggaatgggtgacgtgcgccaacgaaattgcgcgaaaccacccaaacatgagttttggacctaaagtagtggattgggtatgttcgttgcgaaaaacgaagaaatggttccggtggcaaaaactcgtgctttgtatgcaccccgacaaccgttttcagaatgggtgacgtgcggcaacgaaattgcgcgaaaccacaccaaacatgagttttggacctaaagtagtggattgggcatgttcgttgcgaaaaacgaagaaatggttccggtggcaaaaactcgtgctttgtatgcacctgacacccgttttcggaatgggtgacgtgcgacaacgaaattgcgcgaaaccacgccaaacatgagttttggacctaaattagtggattgggcatgttcgttgcgaaaaacgaagaaatggttccggtggcaaaaactcgtgctttgtatgcacccgacacccgttttcggaatgggtgacgagtgacaacgaaattgcgcgaaaccacactaaacatgatttttggacctaaagtagtggtttgggcatgttcgttgcgaaaaacgaagaaatggttccggtggcaaaaactcgtgctttgtgtgcacctgacacccgttttcggaatgggtgacgtgcgacaacgaaattgcgcgaaaccacgccaaacatgagttttggaccgaaagtagtggattgggcatgttcgttgcgaaaaacgaagaaatggttccggtggcaaaaactcgtgctttgtatgcaccccgacacccgttttcggaatgggtgacgtgcgacaacgaaattgcgcgaaaccaccccaaacatgagttttggacctaaagtagtggattgggcatgtttgttgcgaaaaacgaagaaatggttccggtggcaaaaactcgtgctttgtatgcacctcacacccgtttttggaatgggtgacgtgtgacaacgaaattgcgcgaaaccaccccaaacatgagttttggacctaaagtagtggattgggcatgttcgttgcgaaaaacgaagaaatggttccggtggcaaaaactcgtgctttgtatgcacccgacacccgttttcggaatgggtgacgtgcgacgacgaaattgcgtgaaaccaccccaaacatgagttttggacctaaagtagtggattgggcatgttcgttgcgaaaaacgaagaaattattccggtggcaaaaactcgtgctttgtacgcacccgacacccgttttcggaatgggtgacgtgcggcaacgaaattgcgcgaaaccacaccaaacaagagttttggacctaaagttgtggattgggcatgttcgttgcgaaaaacgtgatgtgcacccgttgggtgattgcccgatctttcgatgagagggtgtggaataactcgattgggggaggagacgacgttcacggcccgactacagccttccaaagacgctgcgccttagcaaccgatacaccacctcctatggctgtcacgatcttgtggagcgtgacaccctggccactagggcactcgtcctgcaagcaatcgaagaactagcaagaacaagtagaacaagtactgaattaccagatctaaatgtaggtttaaagatcaaactacaatatggtggggttccgaagacaagaagacgggcggctgaactagcacgcgcgcttgcaagcaagtagcgagagctaaacttgatctaaacaaaacccctgttcttggtggcggctagggggtttataaacatgggaggacgaccacaagggtattggggtcgtgctgcaaccctaggatgcgtccctaatggacctaacttgatacacgacccattgggccaaaatagggtgacacagcaccatgggcagaaaaggcaggaaatgtctcggtaagaaaacaatgattacggcggcctcagaacagatatgactataattccggatccatatgaaagtagacttgataagctttccatgttgtgcttgaacattccaatccgagcccgcatctgaccgtggtgaccgtcacaagttggtgttcttctgcagtccgaatccagcatgttcaaatccttttccctttcggtcttctccctgattcctaagcaaaacaagagtgcacgggtctccatggtctaaatatgatggacatgaactcaagagtgtaatcacctgatggttgagttgacgagcacgagcgcgagtaatgggaccagaaattggtacttgtattggtatagatgcatcagtagtgtggatgtcttcatcaaaacgaagaaatggttccggtggcaaaaactcgtgctttgtatgcacccgacacccgttttcggaatgggtgacgtgcggcaacgaaattgcgcgaaaccacaccaaacatgagttttggacctaaagtagtggattgggcatgttcgttgcgaaaaacgaagaaatggctccggtggcaaaaactcgtgctttgtatgcacccgacaccctttttcggaatgggtgacgtgtgacaacgaaattgcgcgaaaccacaccaaacatgagttttggacctaaagtagtggattgggcatgttcgttgcaaaaaacgaagaaatggttccggtggcaaaaactcgtgctttgtatgcacctgacacccgttttcggaatgggtgacgtgcgacaacgaaattgcgcgaaaccacgccaaacatgagttttggacctaaattagtggattgggcatgttcgttgcgaaaaacgaagaaatggttccggtggcaaaaactcgtgctttgtatgcacccgacacccgttttcggaatgggtgacgagtgacaacgaaattgcgcgaaaccacaccaaacatgatttttggacctaaagtagtggattgggcatgttcgttgcgaaaaacgaagaaatggttccggtggcaaaaactcgtgctttgtgtgcacatgacacccgttttcggaatgggtgacgtgcgacaacgaaattgcgcgaaaccacgccaaacatgagttttggaccgaaagtagtggattgggcatgttcgttgcgaaaaacgaagaaatggttccggtggcaaaaactcgtgctttgtatgcaccccgacacccgttttcggaatgggtgacgtgcgacaacgaaattgcgcgaaaccaccccaaacatgagttttggacctaaagtagtggattgggcatgtttgttgcgaaaaacgaagaaatggttccggtggcaaaaactcgtgctttgtatgcacccgacacccgttttcggaatgggtgacgtgcgacaacaaaattgcgcgaaaccacaccaaacatgagttttggacctaaagtagtggattgggcatgttcgttgcgaaaaacgaagaaatggttccggtggcaaaaactcgtgctttgtatgcacctgacacccgttttcggaatgggtgacgcgcgacaacgaaattgcgcgaaaccacaccaaacatgagttttggacctaaagtagtggattgggcatgttcgttgcgaaaaacgaagaaatggttccggtggcaaaaactcgtgctttgtttgcacctgacacccgttttcggaatgggtgacgtgcgacaacgaaattgcgcgaaaccaccccaaacatgagttttggacctaatgtagtggattgggcatgttcgttgcgaaaaacgaagaaatggttccggtggcaaaaactcgtgctttgtatgcacccgacacccgttttcggaatgggtgatgtgcgacaacgaaattgcgcgaaaccaccccaaacatgatttttggacctaaagtagtggattgggcatgttcgttgcgaaaaacgaagaaatggttccggtggcaaaaagtcgtgctttgtatgcaccccggcaaccgttttcagaatgggtgacgtgcgacaacgaaattgcgcgaaaccaccccaaacatgagttttggacctaaagtagtggattgggcatgttcgttgcgaaaaacgaagaaatggttccggtggcaaaaactcgtgctttgtatgcacccgacacccgttttcggaatgggtgacgtgcggcaacgaaattgcgcgaaaccaccccaaacatgagttttggacctaaagtagtggattgggcatgttcgttgcgaaaaacgaagaaatggttccggtggcaaaaactcgtgctttgtatgcacctgacacccgttttcgtaatgggtgacgcgcgacaacgaaactgcgcaaaaccaccccaaacatgagttttggacctaaagtagtggattgggcatgttcgttgcgaaaaacgaagaaatggttccggtggcaaaaactcgtgctttgtatgcaccccaacacccgttttcggaatgggtgacgtgcgacaacgaaattgcgcaaaaccaccccaaacatgagttttggacctaaagtagtggattgggcatgttcgttgcgaaaaacaaaaaaatggttccggtggcaaaaactcgtgctttgtatgcacccgacacccgttttcggaatgggtgacgtgcgacaacgaaattgcgcgaaaccaccccaaacatgagttttggacctaaagtagtggattgggcatgttcgttgcgaaaaacgaagaaatggttccggtggcaaaaactcgtgctttgtatgcacccgacacccgttttcggaatgggtgacttgcgacaacgaaattgcgcgaaaccaccccaaacatgagttttggacctaaagtagtggattaggcatgttcgttgcgaaaaacgaagaaatggttccggtggcaaaaactcgtgctttatatgcacccgacacccgttttcggaatgggtgacgtgcggcaacgaaattgcgcgaaaccaacccaaacatgagttttggacctaaagtagtggattgggcatgttcgttgcgaaaaacgaagaaatggttccggtggcaaaaactcgtgctttgtatgcaccccaacacccgttttcggaatgggtgacgtgcgacaacaaaattgcccgaaaccaccccaaacatgatttttggacctaaagtagtggattgggcatgttctttgcgaaaaacaaaaaaatgattccggtggcaaaaactcatgctttgtatgcacccgacacccgttttcggaaagggtgacgtgcgacaacaaaattgcgcgaaaccaccccaaacatgagtttggacctaaagtagtggattaggcatgttcgttgcgaaaaacgaagaaatggttccggtggcaaaaactcgtgctttgtatgcacccgacacccgttttcggaatgggtgacgtgcggcaacgaaattgcgcgaaaccaacccaaacatgagttttggacctaaagtagtggattgggcatgttcgttgcgaaaaacgaagaaatggttccggtggcaaaaactcgtgctttgtatgcacccgacacccgttttcggaatgggtgacgtgcgacaacgaaattgcgcgaaaccaccccaaacatgagttttggacctaaagtagtggattgggcatgttcgttgcgaaaaacgaagaaatggttccggtggcaaaaactcgtgctttgtatgcacccgacacccgttttcggaatgggtgacgtgcgacaacgaaattgcgcgaaaccaccccaaacatgagttttggacctaaagtagtggattgggcatgttcgttgcgaaaaacgaagaaatggttccggtggcaaaaactcgtgctttgtatgcaccccgactcccgttttcggaatgggtgacgtgcgacaacgaaattgcgcgaaaccaccccaaacatgagttttggacctaaagtagtggattgggcatgttcgttgcgaaaaacgaagaaatggttccggtggcaaaaactcgtgctttgtatgcacccgacacccgttttcggaatgggtgacgtgcggcaacgaaattgcgcgaaaccaacccaaacatgagttttggacctaaagtagtggattgggcatgttcgttgcgaaaaacgaagaaatggttccggtggcaaaaactcgtgctttgtatgcacttgacacccgttttcgtaatgggtgacacgcgacaacgaaactgcgcaaaaccaccccaaacatgagttttggacctaaagtagtggattgggcatgttcgttccgaaaaacgaagaaatggttccggtggcaaaaactcgtgctttgtatgcaccccaacccccgttttcggaaagggtgacgtgcgacgacgaaattgcgcgaaaccaccccaaacatgagtttggacctaaagtagtggattgggcatgttcgttgcgaaaaacgaagaaatggttccggtggcaaaaactcgtgctttgtatgcacccgacacccgttttcggaatgggtgacttgcgacaacgaaattgcgcgaaaccaccccaaacatgagttttggacctaaagtagtggattgggcatgttcgttgcgaaaaacgaagaaatggttccggtggcaaaaactcgtgctttgtatgcacccgacaaccgttttcggaatgggtgacgtgcgacaacgaaattgcgcgaaaccaccccaaacatgagttttggacctaaagtagtggattgggcatgttcgttgcgaaaaacgaagaaatggttccggtggcaaaaactcgtgctttgtatgcacctgacacccgttttcggaatgggtgacgtgcgacaacgaaattgcgcgaaaccaccccaaacatgagttttggacctaaagtagtagtggattgggcatgttcgttgcgaaaaacgaagaaatggttccggtggcaaaaactcgtgctttgtatgcaccccgacacccgttttcggaatgggtgacgtgcgacaacgaaattgcgcgaaaccaccccaaacatgagttttggacctaaagtagtggattgggcatgttcgttgcgaaaaacgaagaaatggttccggtggcaaaaactcgtgctttgtatgcacccgacacccgttttcggaatgggtgacgcgggacaacgaaaccgcgcgaaaccaacccaaacatgagttttggacctaaagtagtggattgggcatgttcgttgcgaaaaacgaagaaatggttccggtggcaaaaactcgtgctttgtatgcaccccgacacccgttttcggaatgggtgacttgcgacaacgaaattgcgcgaaaccaccccaaacatgagttttggacctaaagtagtggattgggcatgttcgttgcgaaaaacgaagaaatggttccggtggcaaaaactcgtgctttgtatgcacccgacaaccgttttcggaatgggtgacgtgcgacaacgaaattgcgcggaaccaccccaaacatgagtgttggacctaaagttgtggattgggcatgttcgttgcgaaaaacgaagaaatggttccggtggcaaaaactcgtgctttgtatgcacccgacacccgttttcggaatgggtgacgtgcgacgacgaaattgcgcgaaaccaccccaaacatgagttttggacctaaagtagtggattaggcatgttcgttgcgaaaaatgaagaaatggttccggtggcaaaaactcgtgctttgtatgcacccgacacccgttttcggaaagggtgacgtgcgacgacgaaattgcgcgaaaccaccccaaacatgtgatgcggacatcaacaccaacacgagcacatctacaccagcagcaccttctccagcccaggcgccaccccttccacctgggccagtgactcgggcccgtgcaagagaattgaactacatcatgttgttaaagaacgaaggcccggaagaatagacgaccagcccaattgcggcccataatggacgacctagggttggccgcccctaggggctgcgccccctctctatttattcaggagctgcgcctcctttatttcctgagttttgttttacgttagccttagctactctcgaacacgcgctaatctgcgctgtcttcgtgtattcagaactccaccctcgagtaatagattagattgctcgcatcttattcttgttcgttcttcgattgcgcacaggaaacgatcttcgtgatcaggccgatctcgcatcagcaaggtcggtaaccacagggagttggttcagcgattgcattggcgcctcgggcttgctcgtcgtagtcggatcgcaagggtcatcttccgccaaatcggaattatctctactcgccgaaagatcgggcacctcagcttcatcaattggtatcagatttctaggttgatcggtgagtttatcgagcgtttttttttcctacagtccacaaaaccacataaaaattcaggttagatcttatcccagcacccttttgagcctcgcactttctttcaataatctgcattgttgaatttgtgtgctttcgcgtcatttgttgctggttgcattgtgttcttccaccattcaaaccctagcgccgccaccatctctcgtttgatcacaccacaaaccgagtcaacattgtttccttgtttttctccttcggttacgtcaaaaaaaaacagaaaaaacaaaccgagtcaacggctgttttccttgattttctccttcggttacgaaaaaaaaacagaaaaaaaacagaaaaaaaaacaaaccgagtcaacatcgtttccttgtttttctccttcggttacgtaaaaaaaaacagaaacaaaaaacaacgaaggagaaaggatacggttgtttcattccggtcgtttgaaaacataatttgaggtaccttccttaaaccgggcataacttttcgctcgggtgtccaaaaaatctgaaatttttacaggagctagttgacaccattctgaaatttttacggtctgtttggggttcgacaaaattgtcaaaaaaattcaggaaaataaagaaaaaaatccgtcaaagttctcgcacgcttttcagagaacttcctgattttctgtagctcctatctttttgcttcttgtgctgagaaaaatatcaaaaaaatcatacaaaaaagaaaaacaaaatcacctgtgatttctactagtgcctttttggcatcactagtacaatatttacgttactgccattctgctatttccatccatccatcctttgcacctgtggccagcaatatagtttcgtgttttgcactataattcaactttgcattattgtttgatcgtgctaatccttgacttgagtgcagcctacccacaactccacatatttctacgacgagcaggtttctgtttctccacgcaatcgctcatccaatctttcaccggttccacctgttggttgcagttcaccactgtggcttggtaagaacggataagaacttgataacagcactagtgtgagcgccttgtgagcagtacacccctgtttttgtcgttggtttttctccttttggtgtttgcgctaactatggcaggagcacacgacatggtggatgcccagttgcaggaagtaaggggacaagttgatggacttgctgctgacattaggacgatgcatgaacggcttgattcaacgatcacttcgacgaccgagcgtttcaaccaacttgaccttgctcaaacggcgactcgcaccacactcgacaccatcctggcacgccttgatgcattgaccacaaagatggagcaggaatacggcggtgacactgagcaggacgatggagattgccgtggtcgtgcacgtcgtgtggttcgtcatccccctaatgacttattttctaagattaaatttaaaattccatcttttaatggtaaatatgatcctgctgcatatcttgattgggaattagaggtagaacagaaattttcatgccatgatattcctgctaatagccaagtgaaggctgccattagtgaatttactgattttgctttaatttggtggcgtgagtataaacaaaaacttcccattaacagtgtcattacttggacccaattaaaaactgccatgcgccacagatttgttccttcctattatgctcgtgatttgcttaacaaaatgcagcgttttcaacaaggttcacaatctgttgaggaatattaccaggagttgcaaaagggtatgcttcgttgtggtttggttgagtcagatgacgctgctatggcgcgttttcgtggtggtttgaacagggaaattcaggatatacttgattataaggattattttgatataaccacattgtttgaatatgcttgcaaagctgaacgtgaagtgcagggacgacgatcaaagacatatactaactcttttgcaggccggggtccaacacacagctcaactccttccagccctgcacctcctacgcctagcactacatcgcgcacagggccggccaagccagtggcgccccctgccaaaggcgccgcttcttccacaggacgtacacgggatattcagtgccatcgttgcagagggtttgggcacatgattcgggactgcccaaacaagcgtaccttgtttatacgtgacaatggtgagtactcttcagccagtgattctgaggaaactagtcatgctatgattgccactaaccatgcagaaaatgaggaagtccacgttgatcccatcgacgccgataggtatgagagtcttgttgtgcagcgtgttctcagcacacaggttgcccaggccgaaaaaaatcagcgacacactctattccataccaagggcgtcgtgcacgaacggtcgattcgcatcatcatcgatagtggcagctgcaacaatttggcaagtacagcgttggtagagaaattatccttgcccactcgcacacatccacatccgtatcacattcaatggcttaatgatggtggtaaaataaaggtaacacgttcggtacgtgtccccttttcgctgggttcttattctgattatgttgattgcgatgttattcctatggaagcatgctctttgttattgggtcgaccttggcaatatgatactgatagtttacatcatggtcgttcaaatcattattctttcatgtttaaaggccagaaaataattatacatccaatgacccctgaccaaattttgaaagatgatcttactagggctgctaaaactgcacaacaagtcaaatcgacatcagccgcacctattaaatctgaaatcaagttgcactctcctgttttacttgctacacgtgctgattttgatgatctccatgaagctcatatgccctgttatgcacttgtatgctcgcgaatgcttgttccgcttgatgatgcaccgtctttggatataccccctgttgttgttaaccttttgcaggagtatgctgatgtttatcctacggacttaccaccgggtcttcctcccctccgtggcattgagcatcagatcgatctcatccccggcacttctcttccgaaccgcgctccgtaccgtacaaatccagatgagacgaaggagatccagcgccaggtgcagacgctgcttgataagggttacattcgtgagtctcttagcccttgctcggttcccgttttactcgttccaaagaaagatgggtcatggcgtatgtgcgtagattgtcgtgctattaataacatcacagttcgttatcgatatcctattccacgccttgatgatatgctagatgagcttagtggtgccgttattttctctaaggttgatttgcgtagcggttaccatcagattagaatgaaactcggtgatgaatggaaaacggcttttaaaacgaaatttggtttatatgaatggttggttatgccatttggattgactaatgctcccagcacctttatgcgtttaatgaacgaagttctacgggccttcataggtttgtttgttgttgtttatttcgatgatatccttatttacagcaagtctatagaggagcatttagaacatttgcgtgctgtttttgacgctttgcgtgctgctcgcttgtttggtaacatggaaaagtgcacattttgcacgcaacgtgtctcgtttcttggttatgtggttactccgcagggcattgaggtggatagcagcaagattgctgccattcgggagtggcctacaccgacgacggtcacacaaattcggagctttcttggacttgccggtttctaccgcagatttgttcgtgattttagctccattgcagcgcctctacatgagcttacaaagaaagatgtgccgtttgcctggagtgattcgcaggaggtagcgttcagcactttgaaagataagttaacccaagctcccctcttgcaattgcctgattttaataaagttttcgagcttgaatgcgatgctagtggtattgggctgggtgctgttttgttacaagaaggaaaaccagttgcttattttagtgaaaaattaagcggtgctagtctgaaatattctacttatgataaggagctttacgctttagtgcgcactttgcatacatggcagcactatctttggcatcgtgagttcataatccattctgatcatgaggctttaaaacatattcgtacccaaacaaatctgaaccgtcgtcatgctaaatgggtagaattcattgagtcctttccttacattattaaacacaagaacgggaaggacaatgttattgctgatgctttgtctcgtcgctataccatgctgtcacagttagattttaaaatctttggtttggacactgtgaaggatcaatatgttgacgatgctgattttaaagatgctttcggccattgtattaatggaaaaccatggggcaaatttcacatacaggatgggttcctgtttcgcgctaacaagctgtgtgttccagctagctcggttcgtcttttgttgttacaggaagcgcatggaggcggtctcatggggcattttgccgtctacaagacacatgaggtgttggctgcccacttcttttggcctcggatgcgcgctgatgtggagcgccttgttgcacgctgcactacttgtcagaaagctaagtcacggttgaacaaccatggtttgtatatgcctttgcctgtcccttcttctccttggcttgatatctctatggactttgttttgggcttgcctagaactaagaaggggagggatagtatttttgtggttgttgatagattctctaaaatggctcactttataccttgtcataaaactgatgatgctagcattgttgctgaagtgttctttagagaaattattcgtttacatggtattccaaaaacaatagtctctgatcgcgatgctaagtttctaagccatttttggagatctctttggaataaattgggaactaaattgttgtttagcactacttgtcaccctcaaactgatggacaaactgaggtagtaaatagaactttatctaccatgcttagggctgttttagacaagaatttgcgacgttgggaggattgcttgcctcatgttgaatttgcttacaatcatgccacacattcttctacaaagatgtgccctttccagattgtttatggttacattcctagggcacctattgatttgatttcacttaatgctgcgaacgccccacatgtagatgcttctgcacatgttgaacaaatgattaccatacatgaacaaacgaaacagaacattgctgctactaatacaaaaaatcaggttgctggtagtaaaggaagaaaacatgttacttttgaacctggtgatatggtttggttgcatttgagaaaggatcgttttcctactttgcgccgttctaaattgatgcctcgtgctgctggtccttttaagatactaaccaagattaatgataatgcttataccctcgacctacctgcggagtttggtgtttccactagttttaatgttgcagatttgaaaccgtatgcgggagaagatgaggagttgccgtcgaggacgacttcagttcaagaaggggaggatgatgcggacatcaacaccaacacgagcacatctacaccagcagcaccttctccagcccaggcgccaccccttccacctgggccagtgactcgggcccgtgcaagagaattgaactacatcatgttgttaaagaacgaaggcccggaagaatagacgaccagcccaattgcggcccataatggacgacctagggttggccgcccctaggggctgcgccccctctctatttattcaggagctgcgcctcctttatttcctgagttttgttttacgttagccttagctactctcgaacacgcgctaatctgcgctgtcttcgtgtattcagaactccaccctcgagtaatagattagattgctcgcatcttattcttgttcgttcttcgattgcgcacaggaaacgatcttcgtgatcaggccgatctcgcatcagcaaggtcggtaaccacagggagttggttcagcgattgcattggcgcctcgggcttgctcgtcgtagtcggatcgcaagggtcatcttccgccaaatcggaattatctctactcgccgaaagatcgggcacctcagctttatcaacatgagtttggacctaaagtagtggattgggcatgttcgttgcgaaaaacgaagaaatggttccggtggcaaaaactcgtgctttgtatgcacccgacacccgttttcggaatgggtgacttgcgacaacgaaattgcgcgaaaccaccccaaacatgagttttggacctaaagtagtggattgggcatgttcgttgcgaaaaacgaagaaatggttccggtggcaaaaactcgtgctttgtatgcacccgacaaccgttttcggaatgggtgacgtgcgacaacgaaattgcgcgaaaccaccccaaacatgagttttggacctaaagtagtggattgggcatgttcgttgcgaaaaacgaagaaatggttccggtggcaaaaactcgtgctttgtatgcacctgacacccgttttcggattgggtgacgtgcgacaacgaaattgcgcgaaaccacctcaaacattagttttggacctaaagtagtggattgggcatgttcgttgcgaaaaacgaagaaatggttccggtggcaaaaactcgtgctttgtatgcacctgacacccgttttcggattgggtgacgtgcgacaacgaaattgcgcgaaaccacctcaaacatgagttttggacctaaagtagtggattgggcatgttcgttgcgaaaaacgaagaaatggttccggtggcaaaaactcgtgctttgtatgcaccccgacacccgttttcggaatgggtgacgtgcgacaacgaaattgcgcgaaaccaccccaaacatgagttttggacctaaagtagtggattgggcatgttcgttgcgaaaaacgaagaaatggttccggtggcaaaaactcgtgctttgtatgcacccgacacccgttttcggaatgggtgacgcgggacaacgaaaccgcgcgaaaccaacccaaacatgagttttggacctaaagtagtggattgggcatgttcgttgcgaaaaacgaagaaatggttccggtggcaaaaactcgtgctttgtatgcaccccgacacccgttttcggaataggtgacgtgcgacaacaaaattgcgcgaaaccaccccaaacatgatttttggacctaaagtagtggattgggcatgttcgttgcaaaaaacgaaaaaatgatttcggtggcaaaaactcgtgctttgtatgcacccgacacccgttttcgggaaagggtgacgtgcgacgacgaaattgcgcgaaaccaccccaaacatgagtttggacctaaagtaatggattgggcatgttccttgcgaaaaaagaagaaatggttcgggtggcaaaaactcgtgttttgtatgcacccgacacccgttttccggaatgggtgacgtgcgacaacgaaattgcgcgaaaccaccccaaacttgagttttggacctaaagtagtggattgggcatgttcgttgcgaaaaaagaagaaatgggttccggtggcaaaaactcgtgctttatatgcacccgacacccgtttttggaatgggtgacgtgcggcaacgaaattgcgcgaaaccaacccaaacatgagttttggacctaaagtagtggattgggcatgttcgttgcgaaaaacgaagaaatggttccggtggcaaaaacttgtgctttgtatgcaccccgacacccgttttcggaatgggtgacgtgcgacaacgaaattgcgcgaaaccaccccaaacatgagttttggacctaaagtagtggattgggcatgttcgttgcgaaaaacgaagaaatgattccggtggcaaaaactcatgctttgtatgcacccgacaaccgttttcggaaagggtgacgtgcgacgacgaaattgcgcgaaaccaccccaaacatgagtttggacctaaagtag

SEQ ID NO: 706 - DNA, 823 bp, Zea mays
  VARIATION (14)..(100): /replace="c" or "g" or "t"
  misc_feature (14)..(100): /note="Nucleotides given in the sequence have no preference with respect to those in the annotations for said positions"
  source: /note="Zea mays BAC clone full insert sequence contig bacm2.pk116.g16.fis1"
cgcgatccgcagtaaaaaaaaaaaaaaaaaaaaaaaaaaaaaaaaaaaaaaaaaaaaaaaaaaaaaaaaaaaaaaaaaaaaaaaaaaaaaaaaaaaaaaacttcatcattctccccttcttgcatttgagtcgtcctcgactcaagctcaacttcctctcccaagtagggctttaaatctgcaatgttaaatgtggggctaaccccaaagtctgcatgcaggtctagcctatatgcattgtcgttaattttctctagcactttaaacggtccatcggctcgaggcaacaatttagattttcgtaattcaggaaacctttcctttctcaaatgcaaccaaactaaatctccaggttcaaaatttatttcctttctacctttatcactagcaaacttatatctagcattcatacgctctatgttttctttagtagtttcatgcagttttaacatcaattcagcacgcctagtagcatcaaaatttagtttttcagaagatggcaaaggcattaaatcaataggagcacgaggcaacaaaccatatacaatctgaaatgggcacatctttgtagtagaatgcaatgatcgattataagcaaattcaacatgaggcaaacagtcctcccacatcttaatattcttctttagaactgcccttaacatagtagacaaagttctattcacaacttcagtttgaccatcagtttgaggatgacatgtagtagaaaataaaagcttagtccccaattttgcccacaaagtcctccaaaaatgactaagaaatttagcatcacgatcagaaacgattgtgttgggcacaccat

SEQ ID NO: 707 - DNA, 772 bp, Zea mays
  VARIATION (9)..(73): /replace="c" or "g" or "t"
  misc_feature (9)..(73): /note="Nucleotides given in the sequence have no preference with respect to those in the annotations for said positions"
  source: /note="Zea mays BAC clone full insert sequence contig bacm2.pk116.g16.fis2"
gtccgatgaaaaaaaaaaaaaaaaaaaaaaaaaaaaaaaaaaaaaaaaaaaaaaaaaaaaaaaaaaaaaaaaaactaagttcggattgtatgagtggttagtcatgccttttgggttaactaatgcacctagcactttcatgagattaatgaacgaggttttgcgtgccttcattggaaaatttgtggtagtatactttgatgacatattgatctacagcaaatctatggatgaacatgttgatcacatgcgtgttgtttttaatgctttacgagatgcacgtttatttggtaaccttgagaagtgcacattttgcaccgatcgagtttcgtttcttggttatgttgtgactccacagggaattgaggttgatcaagccaaggcagaagcgatacatggatggcctatgccaaagactatcacacaggtgcggagtttcctaggacttgctggcttctatcgccgttttgtgaaggactttagcaccattgctgcacctttgaatgagcttacgaagaagggagtgcattttagttggggcaaagtacaagagcacgctttcaacgtgctgaaagataagttgacacatgcacctctcctccaacttcctgattttaataagacttttgagcttgaatgtgatgctagtggaattggattgggtggtgttttgttacaagaaggcaaacctgttgcatattttagtgaaaaattgagtgggtctgttctaaattattctaattatgataaggaattatatgctcttgtgcga

SEQ ID NO: 708 - DNA, 829 bp, Zea mays
  VARIATION (3)..(69): /replace="c" or "g" or "t"
  misc_feature (3)..(69): /note="Nucleotides given in the sequence have no preference with respect to those in the annotations for said positions"
  source: /note="Zea mays BAC clone full insert sequence contig bacm2.pk116.g16.fis3"
ccaaaaaaaaaaaaaaaaaaaaaaaaaaaaaaaaaaaaaaaaaaaaaaaaaaaaaaaaaaaaaaaaaaaggtccaaaactcatgtttgggggtggtttcacgcaatttcgttgccgcacgtcaccaattccgaaaacgagtgtcggggtgcatacaagcaggagtttttgccaccgaaaccatttattcgtttttcgcaacgaacatgcacaatccactactttaggtcaaaaactcatgtttggggtggtttcgcgcaatttcgttgccgcacgtcacccattccgaaaacgggtgtcggggtgcatacaagcacgagttttcgccatcggaaccatttcttcgttttgcgcaacgaacatgcccaatccactactttaagtccaaaactcatgtttggggtggttttgcgcaatttcgttgccgcacgtcacccattccgaaaacgggtgtcggggtgcatacaaagcacgattttttgccaccggaaccatttctccgttttgcgcaacaaaaatgccaaatcaacaactttaggtccaaaactaaggtttgggggggttccccaaactttgttcccccccctccaccagttccaaaaacgggggccggggtgcaaacaatgaagaatttttgcccccgaaaccatttatgcctttttcacaacaaaactgcccaatctgcgacttaaagtccaaaacccatgtttggggggctttaaggaaatttcattgccgaacttcaccatttccaaaaagggggtcagggggaaaaaaaaaaagaattttccccccccgaaacccgtttctacgtttttggcaaaaaaaag

SEQ ID NO: 709 - DNA, 966 bp, Zea mays
  source: /aote="Zea mays BAC cloae full iasert sequeace coatig bacm2.pk116.g16.fis4"
caaattttaaaatcatgataatattcttttacagtcctagcaccctgcttcaaagtgtctaattcagaaagtaagtgatcaacatagtatgcaggaatgaatgcatctctaaaatgaaatttgaattcttcccaagactatggaactttgttgtgcctacaaatgtatttccattccatcaatgcgtgctcagttaacacattagaggcaatataaattttttgtttttgagatagatcatgctcattgaattcctcatctaccttgagctcccaatcaatgtatgcacgaggatcgaatttaccggcatatgaaggcaagtgttgaatgatgcctccaatataacgttcggttgggtcaaaaatgtccatatcacctgccatgtttagtaaagacaagaaacaataaaaaatatctttgattctataaactactaggaatcattgttgtaatttctcactctcaaactggttaaacaagttcttacaagttctcactacgcaaagcaggaggcgctggcaaacaacacgaacaacaacaacagtggctgctagcacaacctggtggtgttgtagaaaattttgtggatttataggtggctgctaaaacaatagttccaaggaatagctagtaccacgttagccacaacaagttgaataaacattccacaatggtgttgtgctggtcctagtccaaaccgtaatagagacgcgagccgttacacaaatagtatcaccaaaagctcagaacagcaatctgatttctgaaactataaaaagaaggcacacaaactgccttttgttttgttgcacttacaaattttatctaccaaaattcagaactggtttttctctctttttttgcatgtgtcttttttttgttttgctgattagtgcggctttttttatgcactcgccttttgctttctcttctttttggttgaattgcagcaagaggtctaaactg

SEQ ID NO: 710 - DNA, 857 bp, Zea mays
  source: /note="Zea mays BAC clone full insert sequence contig bacm2.pk116.g16.fis5"
tgtaggaaaaaaacgctcgataaactcaccgatcaacctggaaatctgataccaattgatgaagctgaggtgcccgatctttcggcgagtagagataattctgatttggcggaagatgacccttgcgatccgactacgacgagcaagcccgaggcgccaatgcaatcgctgaaccaactccctgtggttaccgaccttgctgatgcgagatcggcctgatcacgaagatcgtttcctgtgcgcaatcgaagaacgaacaagaacaagatgcgagcaatctaatctattactcgagggtggagttctgaatacacgaagacagcgcagatttgcgcgtgttcgagagtagctaaggctaacgtaaaacaaaactcaggaaataaaggaggcgcagctcctgaataaatagagagggggcgcagcccctaggggcggccaaccctaggtcgtccattatgggccgcaattgggctggtcgtctattcttccgggccttcgttctttaacaacatgatgtagttcaattctcttgcatgggcccgagtcactggcccaggtggaaggggtggcgcctgggctggagaaggtgctgctggtgtagatgtgctcgtgttggtgttgatgtccgcatcattcttggcacggtaagagcagcaacaacaggagccggtgtaactatcgctaaggcgtagcacccttgtggttgttgtagtcggatagcacaacgtcgacctccaccccaaatcgtagttatcaggagacggtgtacctgtcgctcaaggcgccacaccatcttggttgtggtagtcgggcagccaacgtcgttctccaacaagttttccacctccatcatctct

SEQ ID NO: 711 - DNA, 742 bp, Zea mays
  source: /note="Zea mays BAC clone full insert sequence contig bacm2.pk116.g16.fis6"
tgcatgacctacagctaaactcagcctgagatactgcacattagagattcgacttatatccgggcaaccacctctccaaatctatttaacagacagttacaagtaaatacccattaaaaaggtactgaaaatacctacaagttttgcttaaagagaattcgcaaatttgtgctctgcaactatcaaaacgcggtcgatttattggtgactataacgacgcctaaagttcagacacaacagtgcaacaacttcagagcaacctaactccaattatatgcaatgagaattagaaacccatactctttgaaaagatcatgaaattactaaaactttcataatccacaaagaccaaattataccgtcttcaatgtctactcttccgtacaaaattaaagactcactctgctagagacaccaacaaagatgttttaagaaacccatatctctcaaatgtttagaccaaacatggtgattaagcatcctatggaaagatgcagaaacatactacaaaacattctagataagtgaagcctgattcagcctccaactaatttaaaatgcctcccaaaaccaaacaacacattatcaacaataataaaaaaaacaatataaaatgaaacccaagtcattggcaggtgccatcaacactaggattttccactaccaaactaggatgcaactccacaaagtctttaaataacactctaccaaataggttagaacactaagcacaacaatcaat

SEQ ID NO: 712 - DNA, 1006 bp, Zea mays
  source: /note="Zea mays BAC clone full insert sequence contig bacm2.pk116.g16.fis7"
ctcccagttaagcattgacttcgtttaagataaagcggtccaaataatgattcaacaagcatgcatagagaaactgatcataaaaaaaaatcaaactaccatacaatgttggcaaataaaaaaaataaaatgggttgtcaatatcgtccacatgactagcctgcaacaactagaaattatgcatagcctttatggctattgaaacaaaccatagaaggaaaacatgcacgacataaaatccacttgaaaccaccctatttattgttgaaaaaaataaggttgcacataataagaaaacctatcaggtaaacatggttggacttatcaatctacgtcatcttacaaattcacttgagttctaccagtctcaagatttcatagacattacaatgttgcctttgctctatagagacaaaccaattttatactaagatcaagttagcaagtagccacactagccaaaaaagtgaggcgcaaagcattgcacccatggaaatattacattgataagttgggttgtaacccaacagtcaatcaaactcaacaacaccataaaactacattatatagtgttttcacactacaccaagtcggattagacccactatagacaagctcaataaacaatcggtcctacaagtactagaacccaagaatccttttggaaaaaaacatccacagtcaagcatatagaaatatatgatagtaatagctcagagatttgaaaacattgcatcaaaaaaacatcatgacaatatgtatataaaacaagtacagtagtagcttcacttgcataatatcttcaataacaaccacatcaagaaaccaatattaaatagaaataacatatcatatccagcattacgtcattaatgacgtaccccatcaaaccataaaggaatttggagtaaggaagttctagtcatctatacaataaagtactaatatgaaagatatacgaacccatacccttcctatatgtgcaagtgtgtcaaatttatcttca

SEQ ID NO: 713 - DNA, 815 bp, Zea mays
  source: /note="Zea mays BAC clone full insert sequence contig bacm2.pk116.g16.fis8"
aaccctaaaccctaaaccctaaaccctaaaccctaaaccctaaaccctaaaccctaaaccctaagggcgaattcgatctcgaattcgagccaatatgcgagaacacccgagaaaattcatcgatgatggttgagatgtgtataagagacagccctaaaccctaaaccctaaaccctaaaccctaaaccctaaaccctaaaccctaaaccctaaaccctaaaccctaaaccctaaaccctaaaccctaaaccctaaaccctaaaccctaaaccctaaaccctaaaccctaaaccctaaaccctaagggcgaattcgatatcaagctggccgctcgagctataactatgactctcttaaggtagccaaatgctgcagactagtaattacacataacacacaactttgatgcccacattatagtgattagcatgtcactatgtgtgcatccttttatttcatacattaattaagttggccaatccagaagatggacaagtctaggttgcggccggccgctacaggaacaggtggtggcggccctcggtgcgctcgtactgctccacgatggtgtagtcctcgttgtgggaggtgatgtccagcttggcgtccacgtagtagtagccgggcagctgcacgggcttcttggccatgtagatggacttgaactccaccaggtagtggccgccgtccttcacttcagggccttgtgggtctcgcccttcacacgccgtcgcgggggtacaggcgctcggtggaggcctcccagcccatggtcttcttctgcatcacggggcgtcgaggggagtcacgccgat

SEQ ID NO: 714 - DNA, 1872 bp, Zea mays
  source: /note="Zea mays BAC clone full insert sequence contig bacm2.pk116.g16.fis9"
ctttatctaccatgctaagggctgttttagacaagaatttgagacgttgggaggattgcttgcctcatgttgaatttgcttacaatcatgccacgcattcttctacaaagatgtgccctttccagattgtttatggttacattcctagggcacctattgatttgatttcacttaatgctgcgaacgccccacatgtagatgcttctgcacatgttgaacaaatgattaccatacatgaacaaacgaaacagaacattgctgctactaatgcaaaaaatcaggttgctggtagtaaaggaagaaaacatgttacttttgaacctggtgatatggtttggttgcatttgagaaaggatcgttttcctactttgcgccattctaaattgatgcctcgtgctgctggtccttttaaggtactaaccaagattaatgataatgcttatatccttgacctgcctgcggagtttggtgtttccactagttttaatgttgcagatttgaaaccgtatgcgggagaagatgaggagttgtgatgaagacatccacactactgatgcatctataccaatacaagtaccaatttctggtcccattactcgcgctcgtgctcgtcaactcaaccatcaggtgattacactcttgagttcatgtccatcatatttagaccatggagacacgtgcactcttgttttgcttaggaatcagggagaagaccgaaagggaaaaggatttgaacatgctggattcggactgcagaagaacaccaacttgtgacggtcacgacggtcagatgcgggctcggattggaatgttcaagcacaacatggaaagcttatcaagtctactttcatatggatccggaattatagtcatatctgttctgaggccgccgtaatcattgttttcttaccgagacatttcctgcttttctgcccatggtgccgcgtcaccctattttggcccaatgggtcgagtatcaagttaggtccattagggacgcatcctagggttgcagcacgaccccaatacccttgtggtcgtcctcccatgtttataaaccccctagccgccaccaagaacagcgggttttgcttagatcaagtttagctctcgctacttgcttgcaagcacgcgtgctagttcagccgcccgtcttcttgtctttggaaccccaccatattggagtttgatttttaaacctacatttagatctggtaattcagtacttgttctacttgttcttgctagttcttcgattgcttgcaggacgagtgccctagtggccagggtgtcacgctccacaggatcgtgacagccataggaggtggtgtatcggttgctaaggcgcagcgtctttggaaggctgtagtcgggccgtgaacgtcgtctcctcccccaatcgagttattccacaccctctcatcgaaagatcgggcaatcacccaacgggtgcacatcagttggtaatcagagcaaggtttatcggtgagagatttacttttcttcgctgttttcttatctcctatagtccagaaaaagccaaaaaatagtagattagttttaccgcaatcctataaaccattgagcatttactagtactacttagttagggcttgttgagtttttggttgcatcggttgtgtcgagttgctggtcttagtttattcctttagagttttgagttctaccacgttttggtcaccacgagatccaccatcaccaaaaacatctctggttcgtttttgccaccacggatacatatcatatccgatttggaagtttaaatacaatctggaaagcttatcttatcttctttccaacggatctgaccttatctcaaaattcgttctgagcgctccgcaatcatcgtag

SEQ ID NO: 715 - DNA, 1732 bp, Zea mays
  source: /note="Zea mays BAC clone full insert sequence contig bacm2.pk116.g16.fis10"
cgccactggcttggccggccctgtgcgcgatgtagtgctaggcgtaggaggtgcagggctggaaggagttgagctgtgtgttggaccccggcctgcaaaagagttagtatatgtctttgatcgtcgtccctgcacttcacgttcagctttgcaagcatattcaaacaatgtggttatatcaaaataatccttataatcaagtatatcctgaatttccctgttcaaaccaccacgaaaacgcgccatagcagcgtcatctgactcaaccaaaccacaacgaagcatacccttttgcaactcctggtaatattcctcaacagattgtgaaccttgttgaaaacgctgcattttgttaagcaaatcacgagcataataggaaggaacaaatctgtggcgcatggcagtttttaattgggtccaagtaatgacactgttaatgggaagtttttgtttatactcacgccaccaaattaaagcaaaatcagtaaattcactaatggcagccttcacttggctattagcaggaatatcatggcatgaaaatttctgttctacctctaattcccaatcaagatatgcagcaggatcatatttaccattaaaagatggaattttaaatttaatcttagaaaataagtcattagggggatgacgaaccacacgacgtgcacgaccacggcgatctccatcgtcctgctcagtgtcaccgccgtattcctgctccatctttgtggtcaatgcatcaaggcatgccaggatggtgtcgagtgtggtgcgagtcgccgtttgagcaaggtcaagttggttgaaacgctcggtcgtcgaagtgatcgttgaatcaagccgttcatgcatcgtcctaatgtcagcagcaagtccatcaacttgtccccttacttcctgcaactgggcatccaccatgtcgtgtgctcctgccatagttagcgcaaacaccaaaaggagaaaaaccaacgacaaaaacaggggtgtactgctcacaaggcgctcacactagtgctgttatcaagttcttatccgttcttaccaagccacagtggtgaactgcaatcaacaggtggaaccggtgaaagattggatgagcgattgcgtggagaaacagaaacctgctcgtcgtagaaatatgtggagttgtgggtaggctgcactcaagtcaaggattagcacgatcaaacaataatgcaaagttgaattatagtgcaaaacacgaaactatattgctggccacaggtgcaaaggatggatggatggaactagcagaatggcagtaccgtaaatattgtactagtgatgccaaaaaggcactagtagaaatcacaggtgattttgtttttcttttttgtatgatttttttgatatttttctcagcacaagaagcaacaagataggagctacacgaagtttcacctaaaacagatatcagatgtggtctatggaaaatcaggaagttctctgaaaagcgtgcgagaactttgacgaatttttttctttattttcctgaatttttttgacaattttgtcgaaccccaaacagaccgtaggtcagtttggccggcctcagaatggtgtcaactagctcctgtaaaaatttcagattttttggacacccgagcgaaaagttatgcccgatttacggaaggtacctcaagttatgttctagtgatgcgaccgggatgatacaaccgtatcctttctccttcgttatctttttttt

SEQ ID NO: 716 - DNA, 1994 bp, Zea mays
  source: /note="Zea mays BAC clone full insert sequence contig bacm2.pk116.g16.fis11"
atcagtctgagggtgacaagtagtgctaaacaacaatttagttcccaatttattccaaagagatctccaaaaatggcttagaaacttagcatcgcgatcagagactattgtttttggaataccatgtaaacgaataatttctctaaagaacaattcagcaacaatgctagcatcatcagttttatgacaaggtataaagtgagccattttagagaatctatcaacaaccacaaaaatactatccctccccttcttagttctaggcaagcccaaaacaaagtccatagagatatcaagccaaggagaagaagggacaggcaaaggcatatacaaaccatggttgttcaaccgtgacttagctttctgacaagtagtgcagcgtgcaacaaggcgctccacatcagcgcgcatccgaggccaaaagaagtgggcagccaacacctcatgtgtcttgtagacgccaaaatgccccatgagaccgcctccatgcgcttcctgtaacaacaaaagacgaaccgagctagctggaacacacagcttgttagcgcgaaacaggaacccatcctgtatgtgaaatttgccccatggtttcccattaatacaatggccgaaagcatctttaaaatcagcgtcgtcaacatattgatccttcacagtgtccaaaccaaagattttaaaatctaactgtgacagcatggtatagcgacgagacaaagcatcagcaataacattgtccttcccgttcttgtgtttaataatgtaaggaaaggactcaatgaattcgacccatttagcatgacgacggttcagatttgtttgggtacgaatatgttttaaagcctcatgatcagaatgaattatgaactcacgatgccaaagatagtgctgccatgtatgcaaagtgcgcactaaagtgtaaagctccttatcataagtagaatatttcagactagcaccgcttaatttttcacgaaaataagcaactggttttccttcttataacaaaacaacacctagcccaataccgctagcatcgcattcaagctcaaaaactttattaaaatcaggcaattgcaagaggggagcttgggttaacttatctttcaaagtgctgaacgctaactcctgcgaatcactccaagcaaacggcacatctttctttgtaagctcatgtagaggcgctgcaatggagctaaaatcacgaacaaatctgcggtagaaaccggcaagtccaagaaagctccgaatttgtgtgaccgtcgtcggtgtaggccactccccaatggcagcaatcttgctgctatccacctcaatgccctgcggagtaaccacataaccaagaaacgagacacgttgcgtgcaaaatgtgcacttttccatgttaccaaacaagcgagcagcacgcaaagcatcaaaaacagcacgcaaatgttctaaatgctcctctatatacttgctgtaaataaggatatcatcgaaataaacaacaacaaacaaacctatgaaggcccgtagaacttcgttcattaaacgcataaaggtgctgggagcattagtcaatccaaatggcataaccaaccattcatataaaccaaatttcgttttaaaagccgtttccattcatcaccgagtttcattctaatctgatggtaaccgctacgcaaatcaaccttagagaaaataacggcaccactaagctcatctaacatatcatcaaggcatggaataggatatcgataacgaactgtgatgttattaatagcacgacaatctacgcacatacgccatgacccatctttctttggaacgagtaaaacaggaaccgagcaagggctaagagactcacgaatgtaacccttatcaagcagcgtctgcacctggcgctggatctccttcgtctcctctggatttgtacggtacgggggcgcggttcggaagagaagcgccggggatgagatcgatctgatgctcaatgccacggaggggaggaagac

SEQ ID NO: 717 - DNA, 2203 bp, Zea mays
  source: /note="Zea mays BAC clone full insert sequence contig bacm2.pk116.g16.fis12"
tcgctgaatttcttttgtttcctctggatttgtcctatatggcgcacgattcggcaaagatgcaccaggaataagatcaatttggtgctcaatccctcgtataggtggcagcccctctggtatctcacttggaaatacatcagaatactcctgcaaaatgttagtaataacaggaggcaaagaatgctgcatatcttgaattgaaatcaaagcatccttgcataccaaggcgtaggcaacagtagtgcaagcaaataattcattaacatcagtttttgttgcaagcaagcaatgtcctttcaattttatcccatctttgttattaccaacagctttaatattcttgttgttctcagttttagctttggtagctttagcaacatcatcacgcacaatagcctcaggggacatgggaagcaaaataattttcttatcatggtgtatgagagaatattgatttgatctaccatgatgcatacaatctgaatcaaattgccatggtctacctagcagaatattacaagcatccataggcacaacatcacagtcaacaacatcacgatatgaaccaatagcaaaattaattcgtaccagcttggttaccttgaccttaccactattgttgagccattgaatgtgatatggatgcgggtgcggtttggtcgtaagtgcaagcttctccaccatgtcgctgctagccaagttgttgcagctacctccatcaatgatcaaacgacatgaacgctccttaatgacacactttgtttgaaacaacgtatgtcgctgattctgctctgccttctccatttgtgcactaagcacacgctgtacaatgaggctctcataatgctctgcatcatctgcaccaatctgttcttcgggtggttccttagggcctgcatcatcagccgcaagcaaagcaagtgtagcttcatccaaatcactagcagaggaatacccaccatcgtcttttaccaccaaaacacgctgattaggacaatcacgctgcacgtgtccatagcccttgcatcgataacacagaacacctcttgttctacctgtggaagctactgaagaggcactacctgcgggtttctgggcagatttggttgctgaatttgtggaagatgcacgtggtttgtcgctggaggaaggcgggggtgctggtcgacttggcgagggagttggtgctggtgtacggccggtcatggacgtagtcgtgcgctgttgccatggtgtagattttcctgcagaaacattagaccttgcactagcacgtcgtccctgcacttccctttcagctttgcaagcaagatgaaacaatcgggttacattagcataatctttataagcaaggatgtcctgaatttccctatttaacccgcccaaaaatctagccatagcagattcctcaccctcctctatgttacaacgcagcatacccatttgtaattcctgataatattcttctacacttttagtaccctgtctcaattgttgcaacttgtttaacatatcacgtgcataataagaaggaacaaatctagcccgcatgacccgtttcaacgaatcccaagtttgtggcatgttattaggattcttcttaccatgttctatccaccaaacagaagcaaattcagtaaactcactagtagcagctctaacccgcgcattctcaggaaattcatggcatgcaaacttttgatcaaccgcaatctcccaagtaatgtaagcatcagggtcatatttaccatcaaaaggaggtattttaaatttaaccttactaaaagcatcatcattaccatgtacctcacgtcggcgaaaaccacccatacctctacggttagtacgtagtcgccggcgattaggtgcttcttggtcatcttgttcagtatcagcaacatagtcatcccagttaccttcggcgccctcatcacgcccaccattgatattagcatgcatctcatcaaaccgcctcaagagtgcgacaaggctcttgtcaatatgagcaactgtcatttccacatttgcaagtttggtgtttgtgtcgatctgtgtggcctccaattgccccatcttttcattcgtcacctgcatgtcattatcaagaccttccgtgtgcgtcttcaccagccttacaaagtattgtatgatacccttggtgcgaggagagtgtggcatattacgagaagcatcatcaacc

SEQ ID NO: 718 - DNA, 2773 bp, Zea mays
  source: /note="Zea mays BAC clone full insert sequence contig bacm2.pk116.g16.fis13"
ggaaacaactagtgaatgaacatgttacatctgatattgaaccaaacattttggctaaaaaggaacatgtcatttgtattgcaaacgaaactgaagaaataaatttgctctcttctttaaatacttggggctatattgagtttgatgatctttgtgagctcggtaatttggacaatattttatttgataggtcaactatgtcttgtccttctcatgctaaattttactttgctagtaagtacaacaatacagaacaatttttagtgcatagagtttatatttcatcaatatatagtgtttcttcacattgcacatgttctcaagaagtggagaaattattgtttccatgtactttagtaaaagattcaggtttatttttagaagatcatgataaaaccttagtcatgaacatcaatcatgatgcaacacaaaggacagtttgctgtcaagaagaggagaatgatgagaacataacctgctcagatatgaccaagtcaatggctcctgctgcaaaggtgaaactcttccacattataactaccatcgatatatttgaagaattgatattgcgccgtaaagtgtgtatacttttatttgtagaacttcttacatggatcaagcgatgtgttaagggttcaaggaaggctttgaggaacaaagaagttgattggggaccaagtaatgatatttacaacatcccctaatcatgcaatcacatcataagattgaccagatacttgggtgaggagtacacgctagagtcgaggacgactctattgtaagaaggggaggatgataaggacatcgctgccattgatacaaccacaccaattatcacttcaccattcgtagctaatcagggaccaatgacacgagcttgtgcacgtaaacttaattataaggtgaactcgtttctggctgctgaagctaattcttctttaaatgtggtactaaagtcttgctacgactttattatgctcaggtgtttggtaggtgaaccatcttggagtggagaaaacaacaaagcaataaaagttgttgcacccgagataatttcgtaactgcatcaagtgcatgttaaagagggcatatctttcaactcccaatgttgtttaaagcaaataagcacttgatggaaagcactctttgtctacttcttggtggagaaagaatcaattagagataccaaatgaggcgtccagaaactgtcgagagaacgtcttgactccaccagtccgagggaattcgtaactgcagcaagcaccatattaaatggagcatatctttcatctcctaaggttgtttagtgcaaataagtacttgttggaaagctctcttcgtctactttctggcggctgaagaatcaataggagaaaccaaacgacacgtccagaaactgtcgagagagcttcgttctccaccagaacttctttctattcctctatttaagcaactagcagccaccaaagaacttgggtttttgtttgatgtaagtttagcctttgctacttccttgtaaacgcgtgtgtcggctagaccacccggatacttgaaacagaaccccaactctatcagatccgtgagcgtctgctttttatcttgttcttgcttgttctcgattgcttgcaggttcaaggttgttcttggcacggtaagagcagcaacaacaggagccggtgtaactatcgctaaggcgtagcacccttgtggttgttgtagtcggatagcacaacgtcgacctccaccccaaatcgtagttatcaggagacggtgtacttgtcgctcaaggcgccacaccatcttggttgtggtagtcgggcagccaacgtcgttctccaacaagttttccacctccatcatctctcatcgaaagatcgggcacccttctacccgttgggtttatcacttccacaggacgtacacgggatattcagtgccatcgttgcagagggtttggacatatgattcgggactgcccaaacaagcgtaccttgcttatacgtgacaatggtgagtactcttcagccagtgattctgaggaaactagtcatactatgattgccactaaccatgcagaaaatgaggaagtccacgttgatcccatcgacgccgataggtatgagagtcttgttgtgcagcgtgttctcagcacacaggttgcccaggccgaaaaaaatcagcgacacactctattccataccaagggcgtcgtgcacgaacggtcgattcgcatcatcatcgatagtggcagctgcaacaatttggcaagtacagcgttggtatagaaattatccttgcccactcacacacatccacatccgtatcacattcaatggcttaatgatggtggtaaaataaaggtaacacgttcggtacgtgtccccttttcgctggattcttattctgattatgctgattgcgatgttattcctatggaagcatgctctttgttattgggtcgaccttggcaatatgatactgatagtttacatcatggtcgttcaaatcattattctttcatgtttaaaggccagaaaataattatacatccaatgacccctgaccaaattttgaaagatgatcttactagggctgctaaaactgcacaacaagtcaaatcgacatcagccgcacctattaaatctgaaatcaagttgcactctcctgttttacttgctacacgtgctgattttgatgatctccatgaagctcatatgccctgttatgcacttgtatgctcgcgcatgcttgttccgcttgatgatgcagcgtc

SEQ ID NO: 719 - DNA, 3188 bp, Zea mays
  source: /note="Zea mays BAC clone full insert sequence contig bacm2.pk116.g16.fis14"
ttcgctcttccctttgggtttctgtttgtgtttgaagaccctattctgatcctatttccattttgttcaaagtgaattcttacccccgtgatggtgttttataaggtcccaggttgttggtgaaggtttcctattataacactatgcaaaattcgttcaggttgctttggttggcacagatattcatacccattccccctgctaccacatcgtacttgttaccagacccaatgttttcaacttttctcattttttcttgctgtcacttggacgatgctgacatcatgaagtaaggggacaagttgatggacttgctgcggacattaggacgatgcatgaacggcttgattcaacgatcacttcgacgaccgagcgtttcaaccaacttgaccttgctcaaacggcgactcgcaccacactcgacaccatcctggcacgccttgatgcactgaccacaaagatggagcaggaatacggtggtgacaatgagcaggacgatggagatcgccgtggtcgtgcacgtcgtgtggttcgtcatccccctaatgacttattttctaagattaaatttaaaattccatcttttaatggtaaatatgatcctgctgcatatcttgattgggaattagaggtagaacagaaattttcatgccatgatattcctgctaatagccaagtgaaggctgccattagtgaatttactgattttgctttaatttggtggcgtgagtataaacaaaaacttcccattaacagtgtcattacttggacccaattaaaaactgccatgcgccacagatttgttccttcctattatgctcgtgatttgcttaacaaaatgcagcgttttcaacaaggttcacagtctgttgaggattattaccaggagttacaaaagggtatgcttcgttgtggtttagttgagtcggatgacgctgctatggcgcgttttcgtggtggtttgaacagggaaattcaggatatacttgattataaggattattttgatataaccacattgtttgaatatgcttgcaaagctgaacgtgaagtgcagggacgacgatcaaagacatatactaactctcttgcaggccggggtccaacacacagctcaactccttccagccctgcaccttctacgcctagcactacatcgcgcacagggacgaccaagccagtggcgccccctgccaaaggcgccgcttcttccacaggacctacacgggatattcagtgccatcgttgtagagggtttgggcatatgattcgggactgcccaaacaagcgtaccttgcttatacgtgacaatggtgagtactcttcagccagtgattctgaggaaactagtcatgctatgattgccactaaccatgcagaaaatgaggaagtccacgttgatcctatcgacgccgataggtatgagagtcttgttgtgcagcgtgttctcagcacacaggttgcccaggccgaaaaaaatcagcgacacactctattccataccaagggcgtcgtgcacgaacggtcgattcgcatcatcatctatagtggcagctgcaacaatttggcaagtacagcgttggtagagaaattatccttgcccactcgcacacatccacatccgtatcacattcaatggcttaatgatggtggtaaaataaaggtaacacgttcggtacgtgtccccttttcactgggttcttattctgattatgctgattgcgatgttattcctatggaagcatgctctttgttattaggtcgaccttggcaatatgatactgatagtttacatcatggtcgttcaaatcattattctttcatgtttaaaggccagaaaataattatacatccaatgacccctgaccaaattttgaaagatgatcttactagggctgctaaaactgcacaacaagtcaaatcgacatcagccgcacctattaaatctgaaatcaagttgcactctcctgttttacttgctacacgtgctgattttgatgatctccatgaagctcatatgccctgttatgcacttgtatgctcgcgaatgcttgttccgcttgatgatgcaccgtctttggatataacccctgttgttgttaaccttttgcaggagtatgctgatgtttatcctacggacttaccaccgggtcttcctcccctccgtggcattgagcatcagatcgatctcatccccggcgcttctcttccgaaccgcgccccgtaccgtacaaatccagatgagacgaaggagatccagcgccaggtgcagacactgcttgataagggttacattcgtgagtctcttagcccttgctcggttcctgttttactcgtcccaaagaaagatgggtcatggcgtatgtgcgtagattgtcgtgctattaataacatcacagttcgttatcgatatcctattccacgccttgatgatatgctagatgagcttagtggtgccgttattttctctaaggttgatttgcgtagcggttaccatcagattagaatgaaactcggtgatgaatggaaaacggcttttaaaacgaaatttggtttatatgaatggttggttatgccatttggattgactaatgctcccagcacctttatgcgtttaatgaacgaagttctacgggccttcataggtttgtttgttgttgtttatttcgatgatatccttatttacagcaagtctatagaggagcatttagaacatttgcgtgctgtttttgacgctttgcgtgctgctcgcttgtttggtaacatggaaaagtgcacattttgcacgcaacgtgtctcgtttcttggttatgtggttactccgcagggcattgaggtggatagcagcaagattgctgccattcgggagtggcctacaccgacgacggtcacacaaattcggagctttcttggacttgccggtttctaccgcagatttgttcgtgattttagctccattgcagcgcctctacatgagcttacaaagaaagatgtgccgtttgcttggagtgattcgcaggaggtagcgttcagcactttgaaagataagttaacccaagctcccctattgcaattgcctgattttaataaagtgtttgagcttgaatgcgatgctagcggtattgggctaggtgctgttttgttacaagaaggaaaaccagttgcttattttagtgaaaaattaagcg

SEQ ID NO: 720 - DNA, 4544 bp, Zea mays
  source: /note="Zea mays BAC clone full insert sequence contig bacm2.pk116.g16.fis15"
tcagttcttataaattataaagaagtggagtactttccttaagatttccaacaaatattggatcaccctttttggtgacctataagttaagctacaactgttttaagtggaatctttgaatctgtccaaatgtggacagcaaagcctttcttatgtcttttgaccttgatatgcattgaattaacctgatatgtttataaatgaaatatagacaagtttactggctttcaaaaaagtctaggagcgcctaaattggatgactgagactccaattatggattttttttaagtgagtagttgaattctgtccaagtctggacaaaatttacgtttcgcattgtttgtcctttctaagtgtcaaatctcgtggtgatgataataccaagggtatagtggactttgtaagctttccataaagtcctagtttactactgttggatgcatattttgtgagtttatgagcaaaacaattaaccgttgtgctgatgtctagaaatatgcaagcattaaattgatcttttgaagttactcttgtttggataggtttggtttaggctattggagcacagtatgtattgctttcattatatatattcattgaagtacttgcatgtgtcaatgttgatttggtgtcaggaaaactttgtccgggttatataggactgtctattatcttagcccgagttggcagcttggcttagcacatgcaattgtcggagtctatgatcagagtacgccatgtattccatgtctctatgttgagaaagtatttgcggaatccatatccataatcgagctagagtcgattcccatgtagcaagacctgactctagagtgtcgtctgctgcgtatcctagaatccttgaagctcgaggagctgatgcggcagaagtaccccgaacttttcgttatggggtgagtttttgttgtcgctgatctttccttgtcgttccgataggagcgtcggaattcgaggtcgaattctttttaaggggggtagagtgtgatacccggtttgcaaagaagagaagttgaaggttattctttttgtttgttttttctcttattcgggtgtcgcgctttggggatttagaatttgtggaaaacattcaccagtatagcagtagagtggttggtcgggagctgtcgtgcaagcgagttgggccgcgaatcgcaattcggcccactaaccctcccctaaccctagccgcccccccctttttcccccttgtgttgttgcagccgccgcttcccctcccctttctcttggacgccccccccctctcccatcttcttcctcctcaaacatttgcagccctcaccacccaaaaccctagctgcccccccatttcttcccctcctcccaaggtgcagccctcccgtgtggttctccgtcgtgtggctgcgatctcaattggagtttggagggaggaagaaggaaggagtaagggaagaacctaaggtgaatttgtgattaacttttgttgtttttgtgctgcaatcaattggattatgtgtttatctttgcgaatcggtagaggtgctgtccaggaattttgtgagtgggtgaacagcagtagttctagggatttctgggaattttcgtagggtaattagtgggaatcagtgggataatcatgtagagctttgtcatacctttccaacgagtacttatgcgctcgattcggagttataatttaggagatatcgtcgtttgaatccgggtatgttgctgtccaaaaaaacagatttttcaggtgggtgaacagcagtagtattagcagtttctgggaattttcgtggggtaattagtgggaatcagtgggataatcatgtagagctttgtcatacctttccaacgagtacttatgcgctcgattcggagttataatttaggagatatcgtcgtttgaatccgggtatgttgctgtccaaaaaaacagatttttcaggtgggtgaacagcagtagtattagcagtttctgggaattttcgtggggtaattagtgggaatccgtgggataatcatgtagagctttgtcatacctttccaacgagtacttatgcgctcgattcggagttataatttaggagatatcgtcgtttgaatccgggtatgttgctgtccaaaaaaacagatttttcaggtgggtgaacagcagtagtattagcagtttctgggaatttttcgtggttaattagtgctaaccagtatgataatcatgtatggctttgtcttatctttccaatgagtacttatgcgcttgaattggaattatattttaaaagatatcgctgtttgaatccgggtatgtcgctgtccaaaagagaaaaaaacagattacagggttcaacttgtgaactgttttgggctaattagatgttggaatttaattataaattgtatacaaaacttgtggggaattttatgtagatgcctctggagtttttgtttgttaccaatgctgtcataattttgaagttatgaaattattaagcagcgccgctacagtttggtgggtgtggggagagatgtaacccgtggcggggtttgagtttgtgcgtaggtgcggcgtcgtttatgagcctggttatgtgaaattggtgcactaagttgtgtgtcaaaaacaggtggtggacttccggatcgtacttagggatttgcccgaacttccggtaaaggcaagtaaatatagtggtggttgctaccgtttggtttgcatcctattccctgtcattgagtatgcataagtttttaattatgttaatcattgaattctatgatgaagtttatttgtttggaagtattaattctcaattgtctaatattgtggatgatcataatttggttatgatatatgtggttgattcccatcttggatgaagttgaagtgtctttttgaatcacgttatatgaagtgttgtaggcatgacatgcacatcgcatcatccatcttgcattttgaagttatgtcgtgatcttatggtccgaccgtaccggtacatttttagcatcgtatgttgcccgaggaggggtacgatgcggcttcatatccttagaggtatgaaggcagaagtcatccttgcatttgcagacatttgcattcatgaggaatatatgaagtgtgacattactatgttactattgtggtttctacctgcgaggtgtggtaactaggtgtgttgtacgttgtatacgtgctgcatcttggtaataagaaggtggtggaatcaggtggtggtaaaacaatgttcttatgtggttgaatagtttgataatattttacttgctgagatatgtcatctcactcttgcattactcaatgcaggtacttgatacatgttgggaatgaggggagtagcagcacgtccacttacactctcacaataacgctgcccaggcgcagccatgatttaattagaaacttattgtcaaaggaagtttgttttttatatagacgtgcacactgattaattcagttcaggtcgtacgtttatcttcccttgctagccgattaataatacttagtatgtttttggtcatgatatatgtttataacctgttgcccccttatttatgcaatcttgcaaaggggatgctgccgaaattttatatatggacgtcagaagtgtagttcagtagcattctgggttgtttgtggaacctggggtgttacacaacgaacatgcccaatccactactttaggtccaaaactcatgtttggggtggtttcgcgcaatttcgttgccgcacgtcacccattccgaaatagggtgttggggtgcatacaaagcacgagttttcgccaccggaaccatttcttcgtttttcacaatgaacatgcccaatccactactttaggtccaaaactcatgtttggggtggtttcgcgcaatttcgttgccgcacgtcacccattccgaaaacgggtgtcgggtgcatacaaagcacgagttttcgccaccggaaccatttcttcgtttttcgcaacgaacatgcccaatccactactttaggtccaaaactcatgtttggggtggtttcgcgctatatcgttggcgcacgtcacccattccgaaaacgggtgtcggggtgcatacaaagcacgagtttttgccaccggaaccatttcgtcgttttttgcaacgaacatgcccaatccacaactttaggtccaaaactcatgtttgggtggtttctcgcaatttcgttgccgcacgtcacccattctgaaaacgggtttcggggtgcatacaaagcacgagttttcgccaccggaaccatttctttgtttttcgcgatgaacatgcccaatcccctactttaggtccaaaactcatgtttgtggtggtttcgcgcattttcgttgccgcacgtcacccattccgaaaacgggtgtcggggtgcatacaaagcatgagttttcgccaccggaatcatttcttcatttttcacaacgaacatgcccaatccactactttaggtccaaaactcatgtttggggtggtttcgcgcaatttcgttgccacacgtcacccattc

SEQ ID NO: 721 - DNA, 3712 bp, Zea mays
  source: /note="Zea mays BAC clone full insert sequence contig bacm2.pk116.g16.fis16"
gagttcatgtccatcatatttagaccatggagacccgtgcactcttgttttgcttaggaatcagggagaagaccgaaagggaaaaggatttgaacatgctggattcggactgcagaagaacaccaacttgtgacggtcacgacagtcagatgcgggctcggattggaatgttcaagcacaacatggaaagcttatcaagtctactttcatatggatccggaattatagtcatatctgttctgaggccgccgtaatcattgttttcttaccgagacatttcctgcttttctgcccatggtgctgcgtcaccctattttggcccaatgggtcgagtatcaagttaggtccattagggacgcatcctagggttgcagcacgaccccaatacccttgtggtcgtcctcccatgttaataaaccccctagccgccaccaagaacagcgggttttgtttagatcaagtttagctctcgctacttgcttgcaagcgcgcgtgctagttcagccgcccgtcttcttgtcttcggaaccccaccatattggagtttgatttttaaacctacatttagatctggtaattcagtacttgttctacttgttcttgctagttcttcgattgcttgcaggacgagtgccctagtggccagggtgtcacgctccacaggatcgtgacagccataggaggtggtgtatcggttgctaaggcgcagcgtctttggaaggctgtagtcgggccgtgaacgtcgtctcctcccccaatcgagttattccacaccctctcatcgaaagatcgggcaatcacccaacgggtgcacatcaagttgccgtcgaggacgacttcagttcaagaaggggaggatgatgcggacatcaacaccaacacgagcacatctacaccagcagcaccttctctagcccaggcgccaccccttccacctgggccagtgactcgggcccgtgcaagagaattgaactacatcatgttgttaaagaacgaaggcccggaagaatagacgaccagcccaattgcggcccataatggacgacctagggttggccgcccctaggggctgcgccccccctctatttattcaggagctgcgcctcctttattttccgagttttgttttacgttagccttagctactctcgaacacgcgcaaatctgcgctgtcttcgtgtattcagaactccaccctcgagtaatagattagattgctcgcctctttttcttgttcgttcttcgattgcgcacaggaaacgatcttcgtgatcaggccgatctcgcatcagcaaggtcggtaaccatagggagttggttcagcgattacattggcgcctcaggcttgctcgtcgtagtcggatcgcaagggtcatcttccaccaaatcggaattatctctactcgccaaaagatcgggcacctcagctacatcactaggggatccacatttgatttaattggttattcggatgtcgattgggcggggtgtaagattaatagaaagagcacatcagggacttgccagtttttgggaagatccttggtgtcttgggcttcaaagaagcaaaattccgtagctctttctaccgctgaggccgagtacattgccgcaggccattgttgcgcgcaactactttggatgaggcaaacccttagggactacggttacaaattaaccaaagttcctcttctatgtgataatgagagtgcaatccgcatggcggataatcccgttgagcatagccgcactaaacacatagccattcggtatcattttctaagggatcaccaacaaaagggagatatcgagattgcatatattaacactaaagatcaattagccgatatctttaccaagccacttgatgaacaaacttttaacaaacttaggcatgagctaaatattcttgattctaggaacttcttttgttgatttgcacacatagctcattcatatacctttgatcatgtctctttcatgtgctatgactaatatgttttcaagtaaatttcaaaccaagtcataggtatattgaaagggaattggagtcttcggcgaagacaaaggcttccactccgtaacccatccttcgccgtcgctccgagcaactctccggctttggtataatcttcactcatatgttttatttgccgaaagggagaaaagtagttcaaagggctctaatgattccgtttttggcgatttatgcgaaagggggagagaacatgagcccaaagcaaaaggaccgcaccaccacctaattttaaaagaatttctcaattggtataattttcaaattagtatctcattgtgttcaaaaaaaggggagaggagtagtattttcaaaatcaatatcttaaaaccctcttgaacactaagaggaggatttcatttagggggagttttgtttagtcaaaggaaaagcaattgaaacaaggggagaaaatttcaaatcttgaaaatgcttatcaaaactcttattcatttacttttgactatttgcaaaaggactttgaaaagaatttacaaaagaatttgcaaaaacaaaacatgtggtgcaagcgtggtccaaaatgttaaaaataaaagaaacaatccatgcatatcttatgagtagttatattggctcaattccaagcaacctttgcacttacattatgcaaactagttcaaatatgcacttctatacttgctttggtttgtgttggcgtcaatcaccaaaaagggggagattgaaagggaattaggcttacacctatcttcctaattgattttggtggttgaattgcccaacacaaataattggactaactagtttgctctagtctataagttatacaggtgccaaaggttcacacttagccaataaaaagaccaagaaatgggttcaacaaaaagagcaaggaataaccgaaggcagccctggtctggcgcaccggactgtccggtgtgccaccggacagtgtccggtgcaccaccggactgtgtccggtgcaccagggaactcgacgcccaacttcacaccttcgggaattttcagagacgcttcgctataattcaccggacttgtccggtgcacaccggacagtgtctggtgctccagaggagagcgactctaaactcgccagcttcggatttcagctccgatataattcaccggacatgtccggtgcacaccggactgtccggtgagccagcggagcaatggctacttcgtaccaacggtcacctgcagaagcaattaatgcgcgccagagcgcgcagaagtcaggcacgcgcgaagtggcgcaccggacactctacagtacatgtccggtgtgccaccggacatccaggcgggcccagcagtcagagctccaacggtcggaacccaacggcctggtgacgtggctggcgcaccggacactgtccggtgtgcaccggactgtccggtgcaccatgcgacagacagcctccaccaaacggctagtttggtggaggctgtctgtcgcatggtgcaccggacagtccggtgcacaccggacagtgtccggtgcgccagccacgtcaccaggccgttgggttccgaccgttggagctctgactgctgggcccgcctggatgtccggtggcacaccggacatgtactgtagagtgtccggtgcgccacttcgcgcgtgcctgacttctgcgcgctctggcgcgcattaattgcttctgcaggtgaccg

SEQ ID NO: 722 - DNA, 4980 bp, Zea mays
  source: /note="Zea mays BAC clone full insert sequence contig bacm2.pk116.g16.fis17"
atccactactttaggtccaaaactcatgtttggggtggttttgcgcatttcgttgccgcacgtcacccattccgaaaacgggtgtcggggtgcatacaaagcacgagttttcgccaccggaaccatttcttcattttgcgcaatgaacatgcccaatccactactttaggtccaaaactcatgtttgggggtggtttcacgcaatttcgttgccgcacgtcaccaattccgaaaacgagtgtcggggtgcatacaagcaggagtttttgccaccgaaaccatttattcgtttttcgcaacgaacatgcacaatccactactttaggtcaaaaactcatgtttggggtggtttcgcgcaatttcgttgccgcacgtcacccattccgaaaacgggtgtcggggtgcatacaagcacgagttttcgccatcggaaccatttcttcgttttgcgcaacgaacatgcccaatccactactttaggtccaaaactcatgtttggggtggttttgcgcaatttcgttgccgcacgtcacccattccgaaaacgggtgtcggggtgcatacaaagcacgagtttttgccaccggaaccatttcctcgttttgcgcaacgaacatgcccaatccactactttaggtccaaaactcatgtttggggtggtttcgcacaatttcgttgccgtacgtcaccaattccgaaaacgggtgtcggggtgcatacaagcaggagtttttgccaccggaaccatttattcgtttttcgcaacgaacatgcccaatccactactttaggtccaaaactcatgtttggggtggtttcgtgcaatttcgttgccgcacgtcaccaattccgaaaacaggtgtcggggtgcatacaagcactagttttcgccaccggaaccatttcttcgtttttcgcaacgaacatgcccaatccactactttaggtccaaaactcacgtttggggtggtttcgcgcaatttctttgcagcacatcacccattccgaaaacgggtgtcggggtgcatacaaagaacgagagttcgccaccggaaccatttcttcgttttgcgcaacgaacatgcccaatccactactttaggtccaaaactcatgtttggggtggtttcgcgcaatttggttgccgcacgtcaccaattccgaaaacgggtgtcggcgaggatacaagcacgagtttttgccactgaaaccatttattcgtttttcgcaacgaacatgcccaatccactactttaggtccaaaactcatgtttggggtggtttcgcgcaatttcgttgccgcacgtcaccaattccgaaaacgggtgtcggggtgcatacaagcacgagttttcgccaccggaaccatttcttcgtttttcgcaacgaacatgcccaatccactactttaggtccaaaactcatgtttggggtggtttcgcgcaatttcgttgtagcacgtcacccattccgaaaacgggtgtcggggtgcatacaaagcacgagagttcgccaccggaaccatttcttcgtttttcgcaacgaacatgcccaatccactactttaggtacaaactcatgtttggggtggtttcgtgcaatttcgttaccgcacgtcacccattccgaaaacgggtgtcgggtgcatacaaagcatgagttttcgccaccggaaccatttcttcgtttttcgcaacgaacatgccaaatccactactttatgtccaaaactcatgtttggggtggtttcgcgcaatttcgttgcaacatgtcacccattcccaaaacgggggtcagggtgcatataaagcacgagtttttgtcaccggaaccatttcgttgttttttgcaacgaacatgcccaatccactactttaggtccaaaactcatgtttggatggtttcgcgcaatttcgttgccgcacgtcacccattccgaaaatgggtgtcggggtgcatacaagcacgagttttcgccaccggaaccatttcttcgttttgcgcaacgaacatgcccaatccactactttaggtccaaaactcatgtttggggtggttttgcgcaatttcgttgccgcacgtcacccattccgaaaacgggtgtcggggtgcatacaaagcacgagttttcgccgccggaaccatttcttcgtttatcgtaatgaacatgcccaaaccctactttaggtccaaaactcatgtttggggtggtttcgcgcaatttcgttgccgcacgtcacccattccgaaaacgggtgtcgtggtgcatacaaagcatgagttttcgccaccggaaccatttcttcgtttttcacaacgaacatgcccaatccactactttaggtccaaaactcatgtttggggtggtttcgcgtaatttcgttgccgcacgtcacccattccgaaaatgggtgtcggggtgcatacaagcacgagttttcgccatcggaaccatttcttcgttttgcgcaacgaacatgcccaatacactactttaggttcaaaactcatgtttggggtggttttgcgcaatttcgttgccgcatgtcacccattccgaaaacgggtgtcggggtgcatacaaagcacaggttttcgccaccggaaccatttcttcgttttgcgcaatgaacatgcccaatccactactttaggtccaaaactcatttttgggggtggtttcacgcaatttcgttgccgcacgtcaccaattccgaaaacgggtgttggggtgcatacaagcacgagtttttgccaccggaaccatttattcgtttttcgcaacgaacatgcccaatccactactttaggtccaaaactcatgtttggggtggtttcgcgcaatttcgttgccgcacgtcacccattccgaaaacgggtgtcggggtgcatacaagcacgagttttcgccaccggaaccatttcttcatttttcacaacgaacttgcccaatccactactttagggccaaaactcatgtttggggtggtttcgtgcaatttcgttgcagcacgtcacccgttccgaaaacgggtgtcggggtgcatacaaagcacgagagttcgccaccggaaccatttcttcgtttttcgcaacgaacatgcccaatccactactttaggtccaaaactcatgtttggggtggtttcgcgcaatttcgttaccgcacgtcacccattccgaaaacgggtatcgggtgcatacaaagcatgagttttcgccaccggaaccatttcttcgtttttcacaacgaacatgcccaatccattactttaggtccaaaactcatgtttggggtggtttcgcgcaattttgttgtcgtacgtaacccattcccaaaacgggggtcggggtgcatacaaagcacgagtttttgacaccggaaccaattcttcgtttttcgcaacgaacatgcccaatccactactttaggtccaaaactcatgtttggggtggtttcacgcaatttcgttgtcgcacgtcacccattccgaaaacaggtgtcccgcatacaaagcatgagttttcgccaccggaaccatttcttcgtttttcacaacgaacatgcccaatccactactttaggtccaaaactcatgtttggggtggtttcgcgcaatttcgttgccgcacatcacccattccgaaaatgggtgtcggggtgcttacaagcacgagttttcgccatcgaaaccatttcttagttttgcgcaacgaacatgcccaatccactactttaggtccaaaactcatgtttggggtggttttgcgcaatttcgttgccgcacgtcacccattccgaaaacgggtgtcggggtgcatacaaagcacgagttttcgccaccggaaccatttcttcgttttgcgcaatgaacatgaccaatccactactttaggtcaaaaactcatgtttggggtggtttcacgcaatttcgttgccgcacgtcaccaattccgaaaacgggtgtcggggtgcatgaaagtcgcctagaggggggggggtgaatagggcgaatctgaaatttacaaacttaatcacaactacaagtcgggttagcgttagaaatataaaacgagtccgagagagggcgcaatacaaatcgcaagcgaataaagcgtatgacacaaggatttgttttaccgaggttcggttctctcaaacctactccccgttgaggtggtcacaaagaccgggtctctttcaaccctttccctctctcaaacggtccctcggaccgagtgagcttttcttctcaatcacttggaacataaagttcccacaaggaccaccacgcgattggtgtctcttgcctcaattacaagtgagtttgatctcaagaaagaatgagaaagaaagcaatccaagcgcaagagctcaaaagaacacaacaaatctctctcacttaacactaaagcttttgtggaattgggaaaggatttgatcacttgggtgtgtctagaattgaatgctagagctcttgtaagtagttggaaggtggaaaacttggatgacttgaatgtggggtgcacatccaaccaacccactcccctattttgagtccaaatcccctgtttgcgggggaattccccaaattcttgattgatagtcaacccgtccaaaaacgggagtcggggtgctaacaaagcatgatataccgccttacaaaaataaaacccaatttgacccaaaaaaatgcccaccttctacatgaaggccaaaactcatgtttgcaaaagaacccgaagtaatttttcattccaagaaacacccaccccttttttgtccccagggttttttttaataacggccgtgtcggaacaacttacttttttcaaaagtcttctgcaacttaacccctacctttttttgtaaaacaaataaccctggctgagttattccttccttattttttataacaaaccaaaacattaataaaaaatggtaaaataaaggtaaacacgatcagataaataccccca

SEQ ID NO: 723 - DNA, 5476 bp, Zea mays
  source: /note="Zea mays BAC clone full insert sequence contig bacm2.pk116.g16.fis18"
gaacgccccacatgtagatgcttctgcacatgttgaacaaatgattaccatacatgaacaaacgaaacagaacattgctgctactaatacaaaaaatcaggttgctggtagtaaaggaagaaaacatgttacttttgaacctggtgatatggtttggttgcatttgagaaaggatcgttttcctactttgcgccgttctaaattgatgcctcgtgctgctggtccttttaagatactaaccaagattaatgataatgcttataccctcgacctacctgcggagtttggtgtttccactagttttaatgttgcagatttgaaaccgtatgtgggagaagatgaggagttgccgtcgaggacgacttcagttcaagaaggggaggatgatgcggacatcaacaccaacacgagcacatctacaccagcagcaccttctccagcccaggcgccaccccttccacctgggccagtgactcgggcccatgcaagagaattgaactacatcatgttgttaaagaacgaaggcccggaagaatagacgaccagcccaattgcggcccataatggacgacctagggttggccgcccctaggggctgcgccccctctctatttattcaggagctgcgcctcctttatttcctgagttttgttttacgttagccttagctactctcgaacacgcgcaaatctgcgctgtcttcgtgtattcagaactccaccctcgagtaatagattagattgctcgcatcttgttcttgttcgttcttcgattgcgcacaggaaacgatcttcgtgatcaggccgatctcgcatcagcaaggtcggtaaccacagggagttggttcagcgattgcattggcgcctcgggcttgctcgtcgtagtcggatcgcaagggtcatcttccgccaaatcagaattatctctactcgccgaaagatcgggcacctcagcttcatcaaagaacaaccttgaacctgcaagcaatcgagaacaagcaagaacaagataaaaagcagacgctcacggatctgatagagttggggttctgtttcaagtatccgggtggtctagccgacacacgcgtttacaaggaagtagcaaaggctaaacttacatcaaacaaaaacccaagttctttggtggctgctagttgcttaaatagaggaatagaaagaagttctggtggagaacgaagctctctcgacagtttctggacgtgtcgtttggtttctcctattgattcttcagccgccagaaagtagacgaagagagctttccaacaagtacttatttgcactaaacaaccttaggagatgaaagatatgctccatttaatatggtgcttgctgcagttacgaattccctcggactggtggagtcaagacgttctctcgacagtttctggacgcctcatttggtatctctaattgattctttctccaccaagaagtagacgaagagtgctttccatcaagtgcttatttgctttaaacaacattgggagttgaaagatatgccctctttaacatgcacttgatgcagttacgaaattatctcgggtgcaacaacttttattgctttgttgttttctccactccaagatggttcacctaccaaacacctgagcataataaagtcgtagcaagactttagtaccacatttaaagaagaattagcttcagcagccagaaacgagttcaccttataattaagtttacgtgcacaagctcgtgtcattggtccctgattagctacgaatggtgaagtgataattggtgtggttgtatcaatggcagcgatgtccttatcaggaagaagcggcacctttggcagggggcgccactggcttggtcgtccctgtgcgcgatgtagtgctaggcgtaggaggtgcagggctggaaggagttgagctgtgtgttggaccgcggcctgcaagagagttagtatatgtctttgatcgtcgtccctgcacttcacgttcagctttgcaagcatattcaaacaatgtggttatatcaaaataatccttataatcaagtatatcctgaatttccctgtttaaaccaccacgaaaacgcgccatagcagcgtcatccgactcaaccaaaccacaacgaagcatacccttttgtaactcctggtaatattcctcaacagactgtgaaccttgttgaaaacgctgcattttgttaagcaaatcacgagcataataggaaggaacaaatctgtggcgcatggcagtttttaattgggtccaagtaatgacactgttaatgggaagtttttgtttatactcacgccaccaaattaaagcaaaatcagtaaattcactaatggcagccttcacttggctattagcaggaatatcatggcatgaaaatttctgttctacctctaattcccaatcaagatatgcagcaggatcatatttaccattaaaagatggaattttaaatttaatcttagaaaataagtcattagggggatgacgaaccacacgacgtgcacgaccacggcgatctccatcatcctgctcagtgtcaccgccgtattcctgctccatctttgtggtcaaggcatcaaggcgtgccaggatggtgtcgagtgtggtgcgagtcgccgtttgagcaaggtcaagttggttgaaacgctcggtcgtcgaagtgatcgttgaatcaagccgttcatgcatcgtcctaatgtcagcagcaagtccatcaacttctccccttacttcctgcaactgggcatccaccatgtcgtgtgctcctgccatagttagtgcaaacaccaaaacaccaaaaggagaaaaaaccaacgacaaaaacaggggtgtactgctcacaaggcgctcacactagtgctgttatcaagttcttatccgttcttaccaagccacagtggtgaactgcaatcaacaggtggaaccggtgaaagattggatgagcgattgcgtggaaaaacagaaacctgctcgtcgtagaaatatgtggagttgtgggtaggctgcactcaagtcaaggattagcacgatcaaacaataatgcaaagttgaattatagtgcaaaacacgaaactatattgctggccacaggtgcaaaggatggatggaactagcagaatggcagtaacataaatattgtactagtgatgccaaaaaggcactagtagaaatcacaggtgattttgttttttcttttttgtatgatttttttgatatttttctcagcacaagaagcaacaagataggagcgacacgaagtttcacctaaaactgatatcagatgtggtctatagaaaatcaggaagttctctgaaaagcgtgcgagaactttgacgaatttttttctttattttcctgaatttttttgacaattttgtcgaaaccaaacagaccgaaggtgagtttggccgggctcagaatggtgtcaacaagctcctgtaaaaatttcagattttttggacacccgagcgaaaagttatgcccggtttacggaaggtacctcaagttatgttttaaaaacgaccgggatgaaacaaccgtatcctttctccttcgttttcttttttttgtttctgttttttttatgtaaccgaaggagaaaaacaaggaagcggtcgttgactcggtttgtttttttttctgttttttttcgtaaccgaaggagaaaatcaaggaaacggccgttgactcggtttgttttttctgttttttttgacgtaaccgaaggagaaaaacaaggaaacaatgttgactcggtttgtggcgtgatcaaacgggagatggtggcggcgctagggtttgaatggtggaagaacacaatgcaaccagcaacaaatgacgcgaaagcacacaaattcaacaatgcagattattgaaagaaagtgcgaggctcaaaagggtgctgggatgtgatacccggtttgcaaagaagagaagttgaaggttattctttttgtttgtttttttctcttattcgggtgtcgcgctttggggatttagaatttatggaaaacattcaccagtatagcagtagagtggttggtcgggagctgtcgtgcaagcgagttgggccgcgaatcgcaatccggcccactaacccttccctaaccctagccgccgcccccctttttcccccttgggttgttgcagccgcccccttcccctcccctttctcttggacgccccccccctctcccatcttcttcctcctcaaatctttgcagccctcaccacccaaaaccctagccgcccccccatttctccccctcctccaaggtgcagccctcccgtgtggttctccgtcgtgtggctgcgatctcaattggagtttggagggaggaagaaggaaggaggaagggaagaacctaaggtgaatttgtgattaacttttgttgtttttgtgctgcaatcaattggattatgtgtttatctttgcgaatcggtagaggtgctgtccaggaattttgtgagtgggtgaacagcagtagttctagggatttctgggaattttcgtggggtaattagtgggaatcagtgggataatcatgtagagctttgtcatacctttccaacgagtacttatgcgctcgattcggagttataatttaggagatatcgttgtttgaatccgggtatgttgctgtccaaaaaaacagatttttcaggtggatgaacagcagtagtattagcagtttctgggaatttttcgtggttaattagtgctaaccagtatgataatcatgtagggctttgtcttatctttccaatgagtacttatgtgcttgatttggaattatattttaaaagatatcgctgtttgaatccgggtatgttgctgtaaaaaaaaacagatttttcaggtgggtgaacagcagcagtattagcaatttctgggaatttttcgtggttaattagtgctaaccagtatgataatcatgtatggctttgtcttatctttccaatgagtacttatgcgcttgaattggaattatattttaaaagatatcgctgtttgaatccgggtatgtcgctgtccaaaagagaaaaaaacagattacagggtgcatcttgtgaactgttttgggctaattagatgttggaatttaattataaattgtatacaaaacttgtggggaattttatgtagatgcctctggagtttttgtttgttaccaatgctgtcataattttgaagttatgaaattattaagcagcgccgctgcagtttggtgggtgtggggagagatgtaacccgcggcggggtttgagtttgtgcgtaggtgcggcgtcgtttatgagcctggttatgtgaaattggtgcactaagttgtgtgtcaaaaacaggtggtggacttccggatcgtacttagggatttgcccaaacttccggtaaaggcaagtaaatacagtggtggttgctaccgtttggtttgcatcctattccctgtcattgagtatgcataagtttta

SEQ ID NO: 724 - DNA, 8615 bp, Zea mays
  source: /note="Zea mays BAC clone full insert sequence contig bacm2.pk116.g16.fis19"
cgttgccgcacgtcacccattccgaaaacgggtgtcggggtgcatacaaagcacgagtttttgccactgaaaccatttcgtcgttttctgcaacgaacatgcccattccacaactttaggtccaaaactcatgttggggtggtttcgtgccatttcgttgacgcacgtcacccattccgaaaacggatgtcgggtgcatacaaagcacgagttttcgccagcggaacctttttttcgttttgcgcaacgaacatgcccaatccactactttaggtccaaaactcatgtttggggtggtttcgcgcagtttcgttgccgcacgtcacccattccgaaaatgggtgttggggtgcatacaaagcacgagttttcgccaccggaaccatttcttcgtttttcacaatgaacatgcccaatccactactttaggtccaaaactcatgtttggggtggtttcgcgctatatcgttgccgcacgtcacccattccgaaaacgggtgtcggggtgcatacaaagcacgagtttttgccaccggaaccatttcgtcgttttttgcaacgaacatgcccaatccacaactttaggtccaaaactcatgtttgggtggtttcgcgcaatttcgttgacgcacgtcacccattccgaaaacgggtgtcgcatacaaagcacgagttttcgccaccggaaccttttctttgttttttgcaacgaacatgcccaatccactactttaggtccaaaactcatgtttggggtggttttgcacaatttcgttgccgcatgtcacccattccgaaaacgggtgtcagggtgcatacaaagcatgagttttcgccaccggaatcatttcttcatttttcacaacgaacatgcccaatccactactttaggtccaaaactcatgtttggggtggtttcgcgcaatttcgttgccgcacgtcacccattccgaaaacgggtgtcgaggtgcatacaaagcacgagtttttgccaccggaaccattttgtcgttttttgcaatgaacatgcccaatccacaactttaggtccaaaactcatgtttgggtggtttctcgcaatttcgttgacgcacgtcacccattccgaaaacgggtgtcggggtgcatacaaagcacgagttttcgccaccagaaccttttctttgttttgcgcaacgaacatgcccaatccactactttaggtccaaaactcatgtttgggtggttttgcgcatttttgttgccgcacgtcacccattccgaaaaagggggtggggggtgcatacaaagcatgagttttcgccaccggaaccatttcttcgtttttcacaacgaacatgcccaatccactactttaggtccaaaactcatgtttggggtggtttcgcgcaatttcgttgccgcacgtcacccattccgaaaacgggtgtcggggtgcatacgaagcacgagtttttgccaccgaaaccattttgtcgttttttgcaacgaacatgcccaatccacaactttaggtccaaaactcatgtttgggtggtttctcgttatatcgttgccgcacgtcacccattccgaaaacgggtgtcggggtgcatacaaagcatgagttttcgccaccggaatcatttcttcatttttcacaacgaacatgcccaatccactactttaggtccaaaactcatgtttggggtggtttcgcgcaatttcgttgccacacgtcacccattccgaaaatgggtgtcggggtgcatacaaagcatgagttttcgccaccggaaccatttcttcgttttgcgcaatgaacatgcccaatccactactttaggtccaaaactcatgtttggggtggttttgcgcattttcgttgccgcacgtcacccattccgaaaatgggtgtcggggtgcatacaaagcatgagttttcgccaccggaaccatttcttcgtttttcacaacgaacatgcccaatccactactttaggtccaaaactcatgtttggggtggtttcgcgcaatttcgttgccgcacgtcacccattccaaaaacggatgtcgggtgcatacaaagcacgagttttcgccaccggaaccatttcttcgtttttcgcaacgaacatgcccaatccactactttaggtccaaaactcatgtttggggtggtttcgcgcaatttcgttgccgcacgtcacccattccgaaaacgggtgtcgggtgcatacaaagcacgggttttcgccaccagaaccatttcttcgtttttcgcaacgaacatgcccaatccactactttaggtccaaaactcatgtttggggttgtttcgcgctatatcgttgccgcacgtcacccattccgaaaacgggtgtcggggtgcatacaaagcacgagtttttgccaccgaaaccatttcgtcgttttttgcaacgaacatgcccaatccacaactttaggtccaaaactcatgtttgggtggtttcgcgcaatttcgttgacgcacgtcacccattccgaaaacgggtgtcacggtgcatacaaagcatgagttttcgccaccggaatcatttcttcatttttcacaacgaacatgcccaatccactactttaggtccaaaactcatgtttggggtggtttcgtgcaattttgttgccgcacgtcacccattccgaaaacgggtgtcggggtgcatacaaagcacgagttttcgccaccggaaccatttgttcatttttcacaacgaacatgcccaatccactacttttggtccaaaactcatgtttggggtggtttcgcgcaattttgttgccgcacgtcacccattccgaaaatgggtgtcggggtgcatacaaagcacgagttttttcgccaccggaaccatttcttcgttttgcgcaacgaacatgcccaatccactactttaggtccaaaactcatgtttggggtggtttcgcacaatttcgttgttgtacgtcacccattcccaaaacgggtgtcggggtgcatacaaagcatgagtttttgccaccggaagcaattcttcgtttttcgcaaagaacatgcccaatccactactttaggtccaaaactcatgtttggggtggtttcgcgctatatcgttgtcgcacgtcactcattccgaaaacggttgtcggggtgcatacaaagcacgagtttttgccaccggaaccatttcgtcattttttgcaacgaacttgcccaatccacaactttaggtccaaaactcatgtttgggtggtttcgcgcaatttcgttgacgcacgtcacccgttccgaaaacgggtgtctgggtgcatacaaagcacgagttttcgccaccggaaccattcctttgtttttcgcaatgaacatgcccaatcccctactttatgtccaaaactcatgtttggggtggtttcgcacaatttcgttgccgcacgtcacccattccgaaaatgggtgtcggtgtgcatacaaagcatgagttttcgccaccggaatcattttttcatttttcacaacgaacatgcccaatccactactttaggtccaaaactcatgtttggggtggttttgcgcattttcgttgccgcacgtcacccattccgaaaatgggtgtcggggtgcatacaaagcacgagttttctccaccggaaccatttcttcgttttgcgcaacgaacatgcccaatccactactttaggtccaaaactcatgtttggggtggtttcgcacaatttcgttgtcgtacgtcacccattcccaaaacgggtgtcggggtgcatacaaagcacgagtttttgccaccggaaacaattcttcgtttttcgcaacgaacatgcccaatccactactttaggtccaaaactcatgtttgggggtggtttcgcgctatatcgttgccgcacgtcacccattccgaaaacgggtgtcggggtgcatacaaagcacgagtttttgccaccggaaccatttcttcgtttttacaacgaacatgcccaatccactactttaggtccaaaactcatgtttggggtggtttcgcgcaatttcgttgccgcacgtcacccattccaaaaacgggtgtcggggtgcatacaaaacacgagttttcgccaccggaatcatttcctcgtttttcacaatgaacatgcccaatccactactttaggtccaaaactcatgtttggggtggtttcgagcaatttcgttgtcgtacgtcacccattcccaaaacgtgtgtcggggtgcatacaaagcacgagtttttgccaccggaaccatttgttcgttttgcgcaacgaacatgcccaatccactactttaggtccaaaactcatgtttggggtggtttcgcacaatttcgttgccgcacgtcacccattccgaaaacgggtgtcgcggtgcatacaaagcatgagttttcgccaccggaaccatttcttcgtttttcacaacgaacatgcccaatccactactttaggtccaaaattcatgtttggggtggtttcgcgcaatttcgttgccgcacgtcacccattccgaaaacggatgtcgggtgcatgcaaagcacgagttttcgccaccggaaccattttttcgttttgcgcaacgaacatgcccaatccactactttaggtccaaaactcatgtttggggtggttttgcgcatttttgttgccgcacgtcacccattccgaaaatgggtgtcggggtgcatacaaagcatgagttttcgccaccggaaccatttcttcgtttttcacaacgaacatgcccaatccactactttaggtccaaaactcatgtttggggtggtttcgcgcaatttcgttgccgcacgtcacccattccgaaaacgggtgtcgggtgcatacaaagcacgagtttttgccaccggaaccattttgtcgttttttgcaacgaacatgcccaatccacaactttaggtccaaaactcatgtttgggtggtttctcgcaatttcgttgccgcacgtcacccattccgaaaacgggtttcggggtgcatacaaagcacgagttttcgccaccggaaccatttcttcgtttttcgcaatgaacatgcccaatcccctactttaggtccaaaactcatgtttctggtggtttcacgcaatttcgttgccgcacgtcacccattccgaaaacgagtgtcggggtgcatacaaagcatgagttttcgccaccggaatcatttcttcatttttcacaacgaacatgcccaatccactacttttggtccaaaactcatgtttggggtggtttcgcacaatttcgttgtcgcacgtcacccattccgaaaatgggtgtcggggtgcatacaaagcatgagttttcgccaccggaaccatttcttcgttttgcgcaacgaacatgcccaatccactactttaggtccaaaactcatgtttggggtggttttgcgcaatttcgttgtctcacgtcacccattccgaaaatgggtgtcgcggtgcatacaaagcatgagttttcgccaccggaaccatttcttcgtttttcacaacgaacatgcccaatccactactttaggtccaaaactcatgtttctggtggtttcacgcagtttcgttgccgcacgtcacccattccgaaaacgagtgtcggggtgcatacaaagcatgagttttcgccaccggaatcatttcttcatttttcacaacgaacatgcccaatccactacttttggtccaaaactcatgtttggggtggtttcgcacaatttcgttgtcgcacgtcacccattccgaaaatgggtgtcggggtgcatacaaagcatgagttttcgccaccggaaccatttcttcgttttgcgcaacgaacatgcccaatccactactttaggtccaaaactcatgtttggggtggttttgcgcattttcgttgcctcacgtcacccattccaaaaatgggtgtcgcggtgcatacaaagcatgagttttcgccaccggaaccatttcttcttttttcacaacgaacatgcccaatccactactttaggtccaaaactcatgtttggggtggtttcgcgcaatttcgttgccgcacgtcacccattccgaaaacgggtgtcgggtgcatacaaagcacgagttttcgccaccggaaccatttcttcgtttttcgcaacgaacatgcccaatccactactttatgtccaaaactcatgtttggggtggtttcgcgctatatcgttggcgcacgtcacccattccgaaaacgggtgtcggggtgcatacaaagcacgagtttttgccaccggaaccatttcgtcgttttttgcaacgaacatgcccaatccacaactttaggtccaaaactcatgtttgggtggtttctcgcaatttcgttgccgcacgtcacccattctgaaaacgggtttcggggtgcatacaaagcacgagttttcgccaccggaaccatttctttgtttttcgcgatgaacatgcccaatcccctactttaggtccaaaactcatgtttgtggtggtttcgcgcattttcgttgccgcacgtcacccattccgaaaacgggtgtcggggtgcatacaaagcacgagtttttgccaccggaaccattttttctttttttgcaacgaacatgcccaatccacaactttaggtccaaaactcatgtttgggtggtttctcgttatatcgttgccgcacgtcacccattccgaaaacgagtgtcggggtgcatacaaagcatgaattttcgccaccggaatcatttctacattttcacaacgaacatgcccaatccactactttaggtccaaaactcatgtttggggtggtttcgcgcaatttcgttgccgcacgtcacccattccggaaatggttgtcggggtgcatacaaagcacgagttttcgccaccggaaccatttcttcgttttgcgcaacgaacatgcccaatccactactttaggtccaaaactcatgtttggggtggtttcacacaatttcgttgccgcacgtcacccattccgaaaacgggtgtcggggtgcatacaaagcatgagttttcgccaccggaaccatttcttcgtttttcacaacgaacatgcccaatccactactttaggtccaaaattcatgtttggggtggtttcgcgcaattttgttgccgcacgtcacccattccgaaaacggatgtcgggtgcatgcaaagcaagagttttcgccaccggaaccatttcttcgttttgcgcaacaaacatgcccaatccactactttaggtccaaaactcatgtttggggtggttttgcgcattttcgttgccgcacgtcacccattccgaaaatgggtgtcggggtgcatacaaagcatgagttttcgccaccggaaccatttcttcgtttttcacaacgaacatgcccaatccactactttaggtccaaaactcatatttggggtggtttcgcgcaatttcgttgccgcacgtcacccattcggaaaacgggtgtcgggtgcatacaaagcacgagttttcgccaccggaaccatttcttcgtttttcgcaacgaacatgcccaatccactactttaggtccaaaactcatgtttggggtggtttcgcgctatatcgttgccgcacgtcacccattccgaaaacgggtgtcggggtgcatacaaagcacgagtttttgccaccggaaccatttcttcttttttacaacgaaaatgccccatcccctacattttgtgcaaaaatctcgtgtggggggggttctcgcaatttttttgccccacgtcaccccttcccaaaacgggggtcggggtgcatacaaaacacaagttttctccccccgaaccatttcttcgtttttcacaacgaacaagcccaatccactactttaggtccaaaaatcatgtttgtggtggtttcgcgcaatttcgttgccgcacgtcacccattccgaaaatgggtgtcggggtgcatacaaacacgagttttcgccatcggaaccatttcttcgttttgcgcaacgaacatgcccaatccactactttaggtccaaaactcatgtttggggtggttttgcgcaatttctttgccgcacgtcactcattccgaaaacgggtgttggggtgcatacaagcacgaattttttccaccggaaccatttcttcttttttttcaacgaacatgccccatccactactttatgtccaaaaccaatgtttgggggggtttctcccaatttctttgcagcacgtcacccattccgaaaacgggggtcggggggcatacaaaccaccagatttcgccaccggaacaatttcttcttttttctcaacgaacaagccccctcccccactttaagtccaaaaaaaatgttggggggggttttgcgcactttcgttatcacatgtcgcaacttacgaaaaaagggtgttgggagggatatctagaaaaaattttctgcacccgaaccatttgttctttttttcatcacgcaaagggcccaccccactacctgttgatgacatcttatgaataaggtggttacttgcaagttcgtgcccaccctttcccctcttaaaaaaaggggaatgctggtctttattattcacc

SEQ ID NO: 725 - DNA, 9525 bp, Zea mays
  source: /note="Zea mays BAC clone full insert sequence contig bacm2.pk116.g16.fis20"
gctcatccaatctttcaccggttccacctgttggttgcagttcaccactgtggcttggtaagaacggataaaacttgataacaacattccattgagcgagttgtcaccaccatttccctgttgtcgtcggtttttctccttttggtgttttggtgtttgtgctaactatggcaggagcacacgacacggtggatgcccagttgctggaagtaaggggacaagttgatggacttgctgctgacattaggacgatgcaggaacgacttgattcaacggtcacttcgacgaccgagcatttcaaccagcttgaccttgctcaaacggcgactcgcaccacactcgacaccatcctggcacgccttgatgcattgaccacaaagatggagcaggactacggcggtgacactgagcaggacgatggagatcatcgtggtcgtgcacgccgtgtggttcatcatccccttaatgacttattttctaagattaaatttaaaattccaccttttaatggcaaatatgatcctgctgcatatcttgattgggagttagaggtggaacaaaaattttcatgccatgatattgctgcacattctcaggttaaagttgctattagtgaatttactgattttgctttaatttggtggcgtgagtataagataaaacatcccacttccattccaaccacttgggatcagttgaaagctgcgatgtgacatcgatttgtgccttcgtattatgctcgtgatttgcttaataaaatgcagcgttttcagcaaggttctcaatctgttgaggactatttccaggagttacaaaaaggtatgattcgttgtgggatattggaggacaacgacggcattgagcaccagatcgacctcatccccggcgcacagcttccgaaccgcgcaccgtaccgtacaaatccggatgagacgaaggagattcagcgccaggtacaggtgttgcttgacaagggatacattcgtgagtctcttagcccttgctctattcctgtgttacttgttcccaagaaagatgggtcatggcgtatgtgtgtagactgtcgtgctattaataacatcactattcgttatcgatatcctataccacgccttgatgatatgctagatgagcttagtggtgccattattttcactaagattgatttgcgtagtggttaccactagattagaatgaaactgggtgatgaatggaaaacggcttttaaaacgaaatttggtttatatgtgatgtagctgaggggcccgatctttcggcgagtagagataattccgatttggcggaagatgacccttgcgatccgactacgacgagcaagcccgaggcgccaatgcaatcgctgaaccaactccctatggttaccgaccttgctgatgcgagatcgggctgatcacgaagatcgtttcctatgcgcaatcgaagaacgaacaagaaaaagatgcgagcaatctaatctattactcgagggtggagttctgaatacacgaagacagcgcagatttgcgcgtgttcgagagtagctaaggctaacgtaaaacaaaactcgaaaataaaggaggcgcaactcctgcataaatagagggggcgcagcccctagggcggccaaccctaggtcgtccactatgggccgcagttgggctggtcgtctattcttctgggccctcattcttcagtagcatgacgaagttaagatctctggcacgggcccgagtgattggcccagctaatgaaggaagtggcgcttgatgtggaggtgctgctggtgtagtcgtactcatagtgatgtcctcatcatcctccccttcttgaagtgaagtcgtcctcgacgacaactcctcatcctcggccatatatggtttcaaatctgcaacattaaaactagtggaaacaccaaattccgcaggcaggtcaaggatataagcattatcattaatctttgttagcaccttaaaaggaccagcagcacgaggcattaatttagaacggcgcaaagtaggaaaccgatcctttctcaagtgcaaccaaaccatatcacctggctcaaaagtaacatgttttcttcctttactaccagcaacctgattttttgcattagtagcagcaatgttctgtttcgtttgttcatgtatggtaatcatttgttcaacatgtgcagcagcatctatatgtggggcgttcgcagcattaagtgaaatcaaatcaataggtgccctagggatgtaaccataaataatctggaaagggcacatctttgtagaagaatgcgtggcatgattgtaagcaaattcaacatgaggcaagcaatcctcccaacgtctcaaattcttgtctaaaacagccctaaacatggtagataaagttctatttactacatcagtttgtccatcagtctgagggtgacaagtagtgctaaacaacaatttagttcccaatttattccaaagagatctccaaaaatggcttagaaacttagcatcgcgatcagagactattgtttttggaataccatgtaaacgaataatttctctaaagaacaattcagcaacaatgctagcatcatcagttttatgacaaggtataaagtgagccattttagagaatctatcaacaaccacaaaaatactatccctccccttcttagttctaggcaagcccaaaacaaagtccatagagatatcaagccaaggagaagaagggacaggcaaaggcatatacaaaccatggttgttcaaccgtgacttagctttttgacaagtagtgcagcgtgcaacaaggcactcaacatcagcgcgcatccgaggccaaaagaagtgggcagccaacacctcatgcgttttgtagacgccaaaatgccccatgagaccgcctccatgcgcctcctgtaacaacaaaagacgaaccgaactagctggaacacacagcttgttagcacgaaacaggaacccatcttgtatgtgaaatttgccccatggtatcccattaatacaatggccgaaagcatctttaaaatcagcatcgtcaacatattgatcctttacagtgtccaaaccaaagattttaaaatctaattgtgacagcatggtatagcgacgagacaaagcatcagcaataacattgtccttcccgttcttgtgtttaataatgtaaggaaaggactcaatgaattcgacccatttagcatgacgacggttcagatttgtttgggtacgaatatgttttaaagcctcatgatcagaatggattatgaactcatgatgccaaagatagtgctgccatgtatgcaaagtgcgcactaaagcgtaaagctccttatcataagtagaatatttcagactagcaccgcttaatttttcactaaaataagcaactagttttccttcttgtaacaaaacaacacctagcccaataccgctagcatcgcattcaagctcaaaaactttattaaaatcagacaattgcaagaggggagcttgggttaacttatctttcaaagtgctgaacgctacctcctgcgaatcactccaagcaaacggcacatctttctttgtaagctcatgtagaggcgctgcaatggagctaaaatcacgaacaaatctgcggtagaaaccggcaagtccaagaaagctctgaatttgtgtgaccgtcgttggtgtaggccactcccgaatggcagcaatcttgctgctatccacctcaatgccctgcggagtaaccacataaccaagaaacgagacacgttgcgtgcaaaatgtgcacttttccatgttaccaaacaagcgagcagcacgcaaagcatcaaaaacagcacgcaaatgttctaaatgctcctctatagacttgctgtaaataaggatatcatcgaaataaacaacaacaaacaaacctatgaaggcccgtagaacttcgttcattaaacgcataaaggtgctgggagcattagtcaatccaaatggcataaccaaccattcatataaaccaaatttcgttttaaaagccgttttccattcatcaccgagtttcattctaatctgatggtaaccgctacgcaaatcaaccttagagaaaataacggcaccactaagctcatctaacatatcatcaaggcgtggaataggatatcgataacgaactgtgatgttattaatagcacgacaatctacgcacattcgccatgacccatctttctttggaacgagtaaaacaggaaccgagcaagggctaagagactcacgaatgtaacccttatcaagcagcgtctgcacctggcgctggatctccttcgtctcctctggatttgtacggtacggggcgcggttcggaagagaagcgccggggatgagatcgatctgatgctcaatgccacggaggggaggaagacccggtggtaagtccgtaggataaacatcagcatactcctgcaaaaggttaacaacagtagggggtatatccaaagacggtgcatcatcaagcggaacaagcatgcgcgagcatacaagtgcataacagggcatatgagcttcatggagatcatcaaaatcagcacgtgtagcaagtaaaacaggagagtgcaacttgatttcagatttaataggtgcggctgatgtcgatttgacttgttgtgcagttttagcagccctagtaagatcatctttcaaaatttggtcaggggtcattggatgtataattattttctggcctttaaacatgaaagaataatgatttgaacgaccatgatgtaaactatcagtatcatattgccaaggtcgacccaataacaaagagcatgcttccataggaataacatcgcaatcagcataatcagaataagaacccagcgaaaaggggacacgtaccgaacgtgttacctttattttaccaccatcattaagccattgaatgtgatacggatgtggatgtgtgcgagtgggcaaggataatttctctaccaacgctgtacttgccaaattgttgcagctgccactatcgatgatgatgcgaatcgaccgttcgtgcacgacgcccttggtatggaatagagtgtgtcgctgatttttttcggcctgggcaacctgtgtgctgagaacacgctgcacaacaagactctcatacctatcggcgtcgataggatcaacgtggacttcctcattttctgcatggttagtggcaatcatagcatgaccagtttcctcagaatcactggctgaagagtactcaccattgtcacgtataagcaaggtacgcttgtttgggcagtctcgaatcatgtgcccaaaccctctgcaacgatggcactgaatatcccgtgtacgtcctgtggaagaagcggcgcctttggcagggggcgccactggcttggtcgtccctgtgcgcgatgtagtgctaggcgtagaaggtgcagggctggaaggagttgagctgtgtgttggaccccggcctgcaaaagaattagtatatgtctttgatcgtcgtccctgcacttcacgttcagctttgcaagcatattcaaacaatgtggttatatcaaaataatccttataatcaagtatatcctgaatttccctgttcaaaccaccacgaaaacgcgccatagcagcgtcatctgactcaaccaaaccacaacgaagcatacccttttgtaactcctagtaatattcctcaacagatagtgaaccttgttgaaaacgctgcattttgttaagcaaatcacgagcataataggaaggaacaaatctgtggcgcatggcagtttttaattgggtccaagtaatgacactgttaatgggaagtttttgtttatactcacgccaccaaattaaagcaaaattagtaaattcactaatggcagccttcacttggctattagcaggaatatcatggcatgaaaatttctgttctacctccaattcccaatcaagatatgcagcaggatcatatttaccattaaaagatggaattttaaatttaatcttagaaaataagtcattagggggatgacgaaccacacgacgtgcacgaccacggcgatctccatcgtccagctcagtgtcaccgccgtattcctgctccatctttgtggtcaatgcatcaaggcgtgccaggatggtgtcgagtgtggtgcgagtcgccgtttgagcaaggtcaagctggttgaaatgctcggtcgtcgaagtgaccgttgaatcaagtcgttcctgcatcgtcctaatgtcagcagcaagtccatcaacttgtccccttacttccagcaactgggcatccaccgtgtcgtgtgctcctgccatagttagcacaaacaccaaaacaccaaaaggagaaaaaccgacgacaacagggaaatggtggtgacaactcgctcaatggaatgttgttatcaagttttatccgttcttaccaagccacagtggtgaactgcaaccaacaggtggaaccggtgaaagattggatgagcgattgcctggagaaacagaaaacttgtcgtcgtagaaatatgtggggttttgggtaggctgcagtcaagtcaaggattagcacgatcaaacaaaaatgcaaagttgaattatagtgcaaaacacgaaactatattgctggccacaagtgcaaaggatggatggaactagcagaatgacagtaccgtaaatattgtactagcgaggccaaaaaggcactagtaggaatcacaagtgattttgtttttctttttttgtatgattttttgatatttttctcagcacaaggagcaacaaaataggagctacacgaagttaaacctgaaacagagttcagatgtggtctacagaaaatcaggaagttctctgaaaagcgtgcgagaactttgacgaattttttctttattttcctgatttttttgacaattttatcgaaaccaaacaggctagtttggccagcctcagaatggtgtcaacaagctcctataaaaatttcagattttttgaacaaccgagcgaaaagttatgcccgatttaaggaaggtatgtttaaaacgaccgagatgagacaaccgctttgtatcctttctccttcgttttttttgtttctgttttttttacgtaaccgaaggagaaaaacaaggaagcggcattgactcggtttgttttttttctgttttttggcgtaaccgaaggagaaaaataaggaagcggcgttgactcggttttttggcgtgatcaaacggaatatggtggcggcgcgctagggtttgaatggtggaataacacaatgcaaccagcaacaaatgacgtgaaagcacacaaattcaacaatgcagattattgaaagaaagtgcgaggctcaaaagggtgctaggataaggtctaacctaaatttatatgtggttttgtggactgtaggagaaaaaaaacactcgataaactcacaaatcaacctggaaatctgataccacttgatagagttggagtgcccgatctttcggtgagtggagataattccgatttggtggaagtagaccctcacgatccgactacgacgagtgaacccgaagcgccaatgcaatcgctgaactaactcccaatggttaccgaccttgctgatgcgagatcggcctgatcacgaagatcgtttcctgtgcgcaatcgaagaacgaacaagaaaaagatgcgagcaatcttaatatcactcgaggtggagttctgaatcacagaggacagcacgtatttgtgcgtgttctggggtagctaaagctatatgtaaaacaaaactcaagttctaaatgaaacaggactctgactaaatagaggagaggcgtgaacagtaggcccgacgctacagtaccgcggttactgtttacgacttccctaggcgccccatccgggccttcctgttgggccatcttctaatcttctgggccttcgttctttaacagcatgatgtagttcaattctcttacacgggcccaagtcactggcccaggtggaaggggttgcgcctggactggggaagatggtgcctgggctggagaaggtgttgctggtgttgatgtactcgtgttggtgttgatgtcctcatcaaccccaaacatgagttttggacctaaagtagtggattgggcatgttcgttgcgaaaatcgaagaaatggttccggtggtgaactctcgtgctttgtatgtaccccgacccccattttcggatggatgacgtgctgcaacgaaattgtgcgaaaccaaacatgagttttggacctaaagtagtggattgggcatgttcgttgcgaaaaacgaagaaatagttccggtggcgaaaactcatgctttgtatgcacccgacacccgttttcggaaggggtgacgtgcggtaacgaaattgcgcgaaaccaccccaaacatgagttttggacctaaagtagtggattgggcatgttcgttgcaaaaaacgaagaaatgtttccggtggagaactcttgtgctttgtacgtaccccgacacccgttttcggaatgggtgacgtgctgcaacgaaattgcgcgaaaccaccccaaacatgagttttggacctaaagtagtggattgggcatgttcgttgcgaaaaacgaataaatagttccggtggcaaaaactcgtgcttgtatgcactgaaagggaattaggcttacacctatttcctaattgattttggtggttgaattgcccaacacaaataattggactaactagtttgctctagtctataagttatacaggtgccaaaggttcacacttagccaataaaaagaccaagaaatgggttcaacaaagagagcaagggataaccgaagcctgccatggtctggcgcaccggactgtccggtgtgccaacggacagtgtccggtgcaccaggggacagtgtccggtgcaccaggggactccaagccaaactcttcaccttcgggaattctcagaggcgcttcactataattcaccagactgtccggtgcaccaccggacagtgtccggtgccccagaggagagcgactctgaactcgccagcttcgggaatccgctccgctataattcaccggactgtccggtgagccagcggagcaacggctacttcgcgccaacggtcgactgcaacgcattaaatgcgcgccagcgcgcgcagaggagcagagcacgcgcgggtggcacaccggacagtctacaggacttgtccggtgcaccaccggacagccaggcgggcccacaagtcagagctccaacggtcggaacccaacggcctggtgacgtggctggcgcaccatacattgtccggtgtatcgcaatcttcgggttggtgttataccatgcccagtttattataatgtacacgatgcacttggacaaacgcaagatagcgccggggaattgcaagttatgctagcggctggaaagaattttttctacgtctgttttaagtttaacgcacatctgtgaacattcatatatttgatagtccgtaccccttccccgctctttgtattcacaagaaagccgactcctgtttcctttta

SEQ ID NO: 726 - DNA, 3618 bp, Zea mays
  source: /note="Zea mays BAC clone full insert sequence contig bacm2.pk116.g16.fis21"
cggccagtgccaagctcagatcagcttgcatgcctgcagtgcagcgtgacccggtcgtgcccctctctagagataatgagcattgcatgtctaagttataaaaaattaccacatattttttttgtcacacttgtttgaagtgcagtttatctatctttatacatatatttaaactttactctacgaataatataatctatagtactacaataatatcagtgttttagagaatcatataaatgaacagttagacatggtctaaaggacaattgagtattttgacaacaggactctacagttttatctttttagtgtgcatgtgttctcctttttttttgcaaatagcttcacctatataatacttcatccattttattagtacatccatttagggtttagggttaatggtttttatagactaatttttttagtacatctattttattctattttagcctctaaattaagaaaactaaaactctattttagtttttttatttaataatttagatataaaatagaataaaataaagtgactaaaaattaaacaaataccctttaagaaattaaaaaaactaaggaaacatttttcttgtttcgagtagataatgccagcctgttaaacgccgtcgacgagtctaacggacaccaaccagcgaaccagcagcgtcgcgtcgggccaagcgaagcagacggcacggcatctctgtcgctgcctctggacccctctcgagagttccgctccaccgttggacttgctccgctgtcggcatccagaaattgcgtggcggagcggcagacgtgagccggcacggcaggcggcctcctcctcctctcacggcaccggcagctacgggggattcctttcccaccgctccttcgctttcccttcctcgcccgccgtaataaatagacaccccctccacaccctctttccccaacctcgtgttgttcggagcgcacacacacacaaccagatctcccccaaatccacccgtcggcacctccgcttcaaggtacgccgctcgtcctccccccccccccccctctctaccttctctagatcggcgttccggtccatggttagggcccggtagttctacttctgttcatgtttgtgttagatccgtgtttgtgttagatccgtgctgctagcgttcgtacacggatgcgacctgtacgtcagacacgttctgattgctaacttgccagtgtttctctttggggaatcctgggatggctctagccgttccgcagacgggatcgatttcatgattttttttgtttcgttgcatagggtttggtttgcccttttcctttatttcaatatatgccgtgcacttgtttgtcgggtcatcttttcatgcttttttttgtcttggttgtgatgatgtggtctggttgggcggtcgttctagatcggagtagaattctgtttcaaactacctggtggatttattaattttggatctgtatgtgtgtgccatacatattcatagttacgaattgaagatgatggatggaaatatcgatctaggataggtatacatgttgatgcgggttttactgatgcatatacagagatgctttttgttcgcttggttgtgatgatgtggtgtggttgggcggtcgttcattcgttctagatcggagtagaatactgtttcaaactacctggtgtatttattaattttggaactgtatgtgtgtgtcatacatcttcatagttacgagtttaagatggatggaaatatcgatctaggataggtatacatgttgatgtgggttttactgatgcatatacatgatggcatatgcagcatctattcatatgctctaaccttgagtacctatctattataataaacaagtatgttttataattattttgatcttgatatacttggatgatggcatatgcagcagctatatgtggatttttttagccctgccttcatacgctatttatttgcttggtactgtttcttttgtcgatgctcaccctgttgtttggtgttacttctgcaggtcgaccgccggggatccacacgacaccatgtcccccgagcgccgccccgtcgagatccgcccggccaccgccgccgacatggccgccgtgtgcgacatcgtgaaccactacatcgagacctccaccgtgaacttccgcaccgagccgcagaccccgcaggagtggatcgacgacctggagcgcctccaggaccgctacccgtggctcgtggccgaggtggagggcgtggtggccggcatcgcctacgccggcccgtggaaggcccgcaacgcctacgactggaccgtggagtccaccgtgtacgtgtcccaccgccaccagcgcctcggcctcggctccaccctctacacccacctcctcaagagcatggaggcccagggcttcaagtccgtggtggccgtgatcggcctcccgaacgacccgtccgtgcgcctccacgaggccctcggctacaccgcccgcggcaccctccgcgccgccggctacaagcacggcggctggcacgacgtcggcttctggcagcgcgacttcgagctgccggccccgccgcgcccggtgcgcccggtgacgcagatggatccaccggtcgccaccatggcctcctccgagaacgtcatcaccgagttcatgcgcttcaaggtgcgcatggagggcaccgtgaacggccacgagttcgagatcgagggcgagggcgagggccgcccctacgagggccacaacaccgtgaagctgaaggtgaccaagggcggccccctgcccttcgcctgggacatcctgtccccccagttccagtacggctccaaggtgtacgtgaagcaccccgccgacatccccgactacaagaagctgtccttccccgagggcttcaagtgggagcgcgtgatgaacttcgaggacggcggcgtggcgaccgtgacccaggactcctccctgcaggacggctgcttcatctacaaggtgaagttcatcggcgtgaacttcccctccgacggccccgtgatgcagaagaagaccatgggctgggaggcctccaccgagcgcctgtacccccgcgacggcgtgctgaagggcgagacccacaaggccctgaagctgaaggacggcggccactacctggtggagttcaagtccatctacatggccaagaagcccgtgcagctgcccggctactactacgtggacgccaagctggacatcacctcccacaacgaggactacaccatcgtggagcagtacgagcgcaccgagggccgccaccacctgttcctgtagcggccggccgcaacctagacttgtccatcttctggattggccaacttaattaatgtatgaaataaaaggatgcacacatagtgacatgctaatcactataatgtgggcatcaaagttgtgtgttatgtgtaattactagtctgcagcatttggctaccttaagagagtcatagttatagctcgagcggccagcttgatatcgaattcgcccttagggggtttagggtttagggtttagggtttagggtttagggtttagggtttagggtttagggtttagggtttagggtttagggtttagggtttagggtttaggg

SEQ ID NO: 727 - DNA, 12337 bp, Zea mays
  source: /note="Zea mays BAC clone full insert sequence contig bacm2.pk116.g16.fis22"
cctcaggtatagtagggggtagggaactcgtgcagccgaaacccgggcggaacgctgctgaaaccatagcgtttccagcgtctcctccaggtctcctcggccgagccccgcaccccctcgcggcctagccgtggccggtcagcaccctaccgcgcccagctccagctggcgctgttggctgcctggccggccatggttcggccgtgacgcagccacgaccggctatggctggctagcgccggccagacgccctggacgagtggctgcactgtgggatggcccgttgctcgatgcgttttccatttctcccgtgctcggtggaccttcggtcgccgtcctcgcaagtagacccgccgcgcccagcgcggagggatgctttggatggctcgaccgtagcggctacgctggcgcatgagttgtcttggacccgtgactgcttggaggacccccgctgccgtgcagccgactcccggcgcccgtgtcccatcgttcgtgcgggcatcctgtgcctgctgcattgagaagtgcttgcgtgctgctacacgtcccacgggaagccgtggggatcctctagagcttgccaacgactacgcactagccaacaagagcttcagggttgagatgtgtataagagacagaacatgcccaatccactactttaggtccaaaactcatgtttgaggtggtttcacgcaatttcgttgccaagcacgagtttttgccaccggaaccatttcgtcctttttggcaacgaacatgcccaatccactactttaggtccaaaactcatgtttgggtggtttcgcgcaatttcgttgccgcacgtcacccattccgaaaacgggtgtcggggtgcatacaaagcacgagttttcgccaccggaaccatttcttcgtttttcgtaatgaacatgcccaaaccctactttaggtcgaaaactcatgtttggggtggtttcgcgcaatttcgttgccgcacgtcacccattccgaaaacgggtgtcggggtgcatacaaagcatgagttttcgccaccggaaccatttcttcgtttttcacaacgaacaagcccaatccactactttaggtccaaaaatcatgtttgtggtggtttcgcgcaatttcgttgccgcacgtcacccattccgaaaatgggtgtcggggtgcatacaaacacgagttttcgccatcggaaccatttcttcgttttgcgcaacgaacatgcccaatccactactttaggtccaaaactcatgtttggggtggttttgcgcaatttcgttgccgcacgtcactcattccgaaaacgggtgttggggtgcatacaagcacgagttttcgccaccggaaccatttcttcatttttcgcaacgaacatgcccaatccactactttaggtccaaaactaatgtttggggtggtttcgcgcaatttcgttgcagcacgtcacccattccgaaaacgggtgtcggggtgcatacaaagcacgagagttcgccaccggaaccatttcttcgtttttcgcaacgaacatgcccaatccactactttaggtccaaaactcatgtttggggtggttttgcgcaatttcgttaccgcaggtcacccattccgaaaatgggtgtcgggtgcatacaaagcatgagttttctccaccggaactatttcttcgtttttcgcaacgaacatgcccaatccactactttaggtccaaaactcatgtttggggtggtttcgcgcaatttcgttgtcgtacgtcacccattcccaaaacgggggtcggggtgcatacaaagcacgagtttttgccaccggaaccaattcttcatttttcgtaacgaacatgcccaatccactactttaggtccaaaactaatgtttggggtggtttcgcgcaatttcgttgtcgcacgtcacccattccgaaaacgggtgtcggggtgcatacaaagcactagttttcgccaccagaatcatttcttcgttttgcgcaacaaacatgcccagtccactactttaggtccaaaactcatgtttggggtggtttcgcgcaatttcgttgccgcacgtcaccaattccgaaaacgggtgtcgaggtgcatacaagcacgagtttttgccactggaaccatgtattcgtttttcgcaatgaacatgcccaatccactactttaggtccaaaactcatgtttggggtggtttcgcgcaatttcgttgtcgtacgtcacccattcccaaaacgggggtcggggtgcatacaaagcacgagtttttgccaccggaaccaattcttcgtttttcgtaacgaacatgcccaatccactactttaggtccaaaactcatgtttggggtggtttcgcgcaatttcgttgccgcacgtcatccattccgaaaacgggtgtcggggtgcatacaaagcacgagttttggccaccggaaccattttttcgtttttcgcaacgaacatgcccaattcactactttaggtccaaaactcatgtttggggtggtttcgcgcaatttcgttgccgcacgtcacccattccgaaaacggatgcggtgtgcatacaaagcacgagtttttgacaccggaaccatttctttgttttttgcaacgaacatgcctaatccactactttaggtccaaaactcatgtttggatggtttcgcgcaatttcgttgccgcacgtcacccattccaaaaatgggtgtcggggtgcatacaagcacgagttttcgccaccggaaccatttcttcgttttgcgcaacgaacatgcccaatccactactttaggtccaaaactcatgtttggggtggttttgcgcaatttcgttgccgcacgtcacccattccgaaaacgggggtcggggtgcatacaaagcacgagttttcgccaccggaaccatttcttcgtttttcgtaatgaacatgcccaaaccctactttaggtccaaaactcatgtttggggtggtttcgcgcaatttcgttgccgcacgtcacccattccgaaaacggttgccggggtgcatacaaagcatgagttttcgcaaccggaaccatttcttcgtttttcacaacgaacgtgcccaatccactactttaggtccaaaactcatgtttggggtggtttcgcgcaatttcgttgccgcacgtcacccattccgaaaatgggtgtcggggtgcataaaagcacgagttttcgccatcggaaccatttcttcgttttgcgcaacaaacatgcccaatccactactttaggtccaaaactcatgtttggggtggttttgcgcaatttcgttgccgcacgtcacccattacgaaaacgggtgccggggtgcatacaaagcacgagttttcgccaccggaaccatttcttcgttttgcgcaatgaacatgcccaatccactactttaggtccaaaactcatgtttgggggtggtttcacgcaatttcgttgccgcacgtcacccattccgaaaacgggtgtcggggtgcatacaagcaggagtttttgccaccggaaccatttattcgtttttcgcaacgaacaagcccaatccactactttaggtccaaaactcatgtttggggtggtttcacgcaatttcgttgccgcacgtcaccaattccgaaaacgggtgtcggggtgcacacaagcacgagatttcgccactggaaccatttcttcgtttttcgcaacgaacatgcccaatccactactttaggtccaaaactcatgtttggggtggtttcgcgcaatttcgttgccgcacgtcacccattccaaaaatgggtgtcggggtgcatacaagcacaagttttcgccatcgaaaccatttcttcgttttgcgcaacgaacatgcccaatccactactttaggtccaaaactcatgtttggggtggtttcgcgcaatttcgttgccgcacgtcaccaattccgaaaacgggtgtcggggtgcatacaagcaggagtttttgccaccggaaccatttattcgtttttcgcaacgaacatgcccaatccactactttaggtccaaaactcatgtttggggtggtttcgcgcaatttcgttgcagcacgtcaccaattccgaaaacgggtgtcggggtgcatacaagcacgagttttcgccaccggaacaatttcttcgttttgcgcaacgaacatgcccaatccactactttaggtccaaaactcaagtttggggtggttttgcgcaatttcgttgccgtacgtcacccattctgaaaatgggtgtcggggtgcataaaagcacgagttttcgccatcggaaccatttcttcgttttgcgcaacgaacatgcccaatccactactttaggtccaaaactcatgtttggggtggttttgcgcattttcgttgccgcacgtcacccattccgaaaacgggtgtcggggtgcatacaaagcacgagttttcgccaccggaaccatttcttcattttgcgcaatgaacatgcccaatccactactttaggtccaaaactcatgtttgggggtggtttcacgcaatttcgttgccgcacgtcaccaattccgaaaacgagtgtcggggtgcatacaagcaggagtttttgccaccgaaacctttttctcttttttcgcaacaaaaatgcacaatccactactttaggtccaaaactcatgttgggggtggtttcgcgcaatttcgttgccgcacgtcacccattccaaaaacgggtgtcggggtgcatacaaaacacgagttttcgccaccggaatcatttcttcgtttttcacaatgaacatgcccaatccactactttaggtccaaaactcatgttgggggtggtttcgagcaatttggttgtcgtacgtcacccattcccaaaaggggtgtgggggtgcatacaaagcaggagtttttgccaccggaaccatttttttgtttttcgcaaggaacatgcccaatcccctacttaggtccaaaactcatgtttggggtggttttgcacaatttcgttgctgcacgtcaccaattccgaaaacgggtgtcggggtgcatagaaagcacgggttttcgccaccggaaccatttcttcgttttgcgcaacgaacatgcccaatccactactttaggtccaaaactcatgtttggggtggttttgcgcaatttggttgccgcatgtcacccattccgaaaacgggtgtcggggtgcatacaaagcatgagttttcgccaccggaaccatttcttcgtttttacaacgaacatgcccaatccactactttaggtccaaaactcatgtttggggtggtttcgcgcaatttcgttgccgcacgtcacccattccaaaaacgggtgtcggggtgcatacaaaacacgagttttcgccaccggaatcatttcctcgtttttcacaatgaacaagcccaatccactactttaggtccaaaactcatgtttggggtggtttcgagcaatttcgttgtcgtacgtcacccattcccaaaacgtgtgtcggggtgcatacaaagcacgagtttttgccaccggaaccaattcttcgtttttcgcaacgaacatgcccaatccactactttaggtctaaaactcatgtttggggtggtttctcgttatatcgttgccgcacgtcacccattccgaaaacgggtgtcggtgtgcatacaaagcatgagttttcgccaccggaatcatttcttcatttttcacaacgaacaagtccaatccactactttaggtccaaaactcatgtttggggtggtttcgcgcaatttcgttgccacacgtcacccattccgaaaatgggtgtcggggtgcatacaaagcacgagttttctcgaccggaaccatttcttcattttgcgcaacgaacatgcccaatccactactttaggtccaaaactcatgtttggggtggtttcgcacaatttcgttgtcgtacgtcacccattcccaaaacgggtgtcggggtgcatacaaagcacgagtttttgccaccggaagcaattcttcgtttttcgcaacgaacatgcccaatccactactttaggtccaaaactcatgtttggggtggtttcgcgctatatcgttgccgcacgtcacccattcccaaaacgggtgtcggggtgcatacaaagctcgagtttttgccaccggaaccatttcgtcattttttgcaacgaacatgcccaatccacaactttaggtccaaaactcatgtttgggtggtttcgcgcaatttcgttgacgcacgtcacccgttccgaaaacgggtgtcggggtgcgtacaaagcacgagttttcgccaccggaaccatttctttgttttttgcaatgaacatgcccaatcccctactttagctccaaaactcatgtttggggtggtttcgcacaatttcgttgctgcacgtcacccattccgaaaacgggtgtcggggtgcatagaaagcacgagttttcgccaccggaaccatttcttcgttttgcgcaacgaacatgcccaatccactactttaggtccaaaactcatgtttggggtggttttgcgcaatttcgttgccgcacgtcacccattccgaaaacgggtgtcggggtgcatacaaagcattagttttcgccaccggaaccatttcttcgtttttcacaatgaacatgcccaatccactactttaggtccaaaactcatgtttggggtggtttcgcgcaatttcgttgccgcatgtcacccattccgaaaacgggtgtcggggtgcatacaaagcatgacttttcgccaccggaaccatttcttcgttttttacaacgaacatgcccaatccactactttaggtccaaaactcatgtttggggtggtttcgcgcaatttcgttgccgcacgtcacccattccgaaaacgggtgtcggggtgcatacaaaacacgagttttcgccaccagaaccatttctttgtttttcgcaatgaacctgcccaatccactactttaggtccaaaactcatgtttggggtggtttcgagcaatttcgttgtcgtacgtcacccattcccaaagcgtgtgtcggggtgcatacaaagcacgagtttttgccaccggaaccaattcttcgtttttcgcaacgaacatgcccaatccactactttaggtataaaactcatgtttgaggtggtttctcgttatatcgctgccgcacgtcacccattccgaaaacgggtgtcggggtgcatacaaagcacgagtttttgccaccagaaccatttcgtcgttttttgcaacgaacatgcccaatccacaactttaggtccaaaactcatgtttgggtagtttcgcgcaatttctttaacgcacgtcacccattccgaaaaagggtgtcggggtgcatacaaagcacgagttttcgccaccggaaccatttctttgtttttcgcaatgaacatgcccaatcccctactttaggtccaaaactcatgtttggactggtttcgcgcaatttcgttgccgcacgtcacccattccgaaaatgggtgtcggggtgcatacaaagcatgagttttcgccaccggaatcatttcttcatttttcacaacgaacatgcccctgtctcttatacacatctcaaccctgaagctcttgttggctagtgcgtagtcgttggcaagctctagaggatccccacggcttcccgtgggacgtgtagcagcacgcaagcacttctcaatgcagcaggcacaggatgcccgcacgaacgatgggacacgggcgccgggagtcggctgcacggcagcgggggtcctccaagcagtcacgggtccaagacaactcatgcgccagcgtagccgctacggtcgagccatccaaagcatccctccgcgctgggcgcggcgggtctacttgcgaggacggcgaccgaaggtccaccgagcacgggagaaatggaaaacgcatcgagcaacgggccatcccacagtgcagccactcgtccagggcgtctggccggcgctagccagccatagccggtcgtggctgcgtcacggccgaaccatggccggccaggcagccaacagcgccagctggagctgggcgcggtagggtgctgaccggccacggctaggccgcgagggggtgcggggctcggccgaggagacctggaggagacgctggaaacgctatggtttcagcagcgttccgcccgggtttcggctgcacgagttccctaccccctactatacctgaggggcataccccctcccaggacttcggggagttcagccttcagaaaaccagggtattttccctggacgccacgaaacccatctaagatggccggacacaacgtttttgctcagaatcaggggtttcgctagcgtgacccgttttccctcacgggtcgacccgaacttcgatgtctcacgcggggggaccacgggagggtcccgtgcccttccacgtgcccgtttttgcggccgtggccgaaaatccgtttttggcccgtgcgccatggcgaacccctcgttttcagcccaaacgcaaggccgaacagccctgccacccgtggcagcgcgcctccgagccgttttccctccgttccaccgtgcccttcactcaagacatgcactttaggttcggtgtctttccacatgcttggacttagcttattttcggggtcgtgcccgagcctcagttttcggcccgtgcgccatggcgaacccctcgttttcagcccaaacgcaaggccgaacagccctgccgcctgtggcagcgcgcctcctcccgttttccctccgttccaccttgcccttcactcaagacatgcactttaggttcggtgtctttccacatgcttggacttagcccgtttttgcggccgtggccgaacctcagttatcagcccgcgcgccatggcgaacacctcgttttcagcccaaacgcaaggccgaacagccctgccgcccgtggcagcgcgcctcctcccgttttccctccgttccaccttgcccttcactcaagacatgcactttaggttcggtgtctttccacacgcttggacttagcccgttttcgcggccgtggccgaacctcagttttcagcccgcgcgccatggcgaacacctcgttttcagcccaaacgcaaggccgaacagccctgccgcccgtggcagcgcgcctcctcccgttttccctccgttccaccttgcccttcactcaagacatgcactttaggttcggtgtctttccacacgcttggacttagcccgttttcgcggccgtggccgaacctcagttttcagcccgcgcgccatggcgaacacctcgttttcagcccaaacgcaaggccgaacagccctgccgcccgtggcagcgcgcctcctcccgttttccctccgttccaccttgcccttcactcaagacatgcactttaggttcggtgtctttccacatgcttggacttagcttattttcggggtcgtgcccgagcctcagttttcggcccgcgcgccatggcgaacacctcgttttcagcccaaacgcaaggccgaacagccctgccgcccgtggcagcgcgcctcctcccgttttccctccgttccaccgtgcccttcactcaagacatgcactttaggttcggtgtctttccacatgcttggacttagcttattttcggggtcgtgccctagcctcagttttcggcccgtgcgccatggcgaacccctcgttttcagcccaaacgcaaggccgaacagccctgccgcccgtcgccacgcgcctgctcccgttttccctccgttccaccttgcccttcacttaagacatgcactttaggttcggtgtctttccacaagcttggacttagctaattttggaggtcgtgcccgagcctccgatttcggcccgtgcgccatggcgaacccctcgttttcagcccatacgcaaggccgaacagccctaccgcccgttgccgcgtgcctccgtgtcgttttccctccgttccaccgtgcccttcaccaaagacatccactttaggttcggtgtgtttccacatgcttggacttagtttattttcgggttcgtgccacagccaccatttccggcccgcgcgccatggcgaaccacctgtttttagcccagacgcattgccgaacagccctgccgcccgtcgccgcgggcctccgtgtcgttttccctccgttccatcttgcccttcacccaagacatacacattagcttcggtgtctttccacacgcttggacttagcttatttccgaggccgtgccccagccgctgttttcggcccacgcgccatggcgaaaccctcgttttcagcccaaacgcaaggccgaacagccatgccgcccgtcgccgcgcgcctccgtgtcgttttccctccgttccaccgtgcccttcacccaagacatacacattagcttcggtgtctttccacacgcttggacttagcttatttccgaggccgtgccccagccgccgttttcggcccgcgcgccatggcgaaaccctcgttttcagcccaaacgcaaggccgaacagccatgccgcccgtcgccgcgcacctcctcccgttttccctccgttccaccttgaccttcactccagacatgcactttaggttcggtgtctttccaaacgctgggacttagcccgttttcggaccgtggccgaaccgttgttttcggaccacgcgccatggcgaacacctcgttttcagcccaaacacaaggacgaacatccctgccgcccgtcgccgtgcgcctccgtgccggagcctcagttcgtcgcgtgcctccgtgtcgttttccctccgttccactgtgcccttcaccaaagacatacactttaggttccgtgtctttccacacgcttggacttagcttattttcgagttcgtgcctgagcctcagttttcggcccgtgcgccatggcgaacacctcgttttcagccaggacgcaaggccgaacagccatgccgcccgtcgtcgcgtgcctccgtgtcgttttccctccgttccaccgtgcccttcactcaagacatacaaacaccttagcttcggtgtctttccattccacacgcttggacttagcttattttcgaggtcatgcccgagcctcagttttcggcccgtgcgccatggcgaacccctcgttttcagcccagacgcaaggccgaacagccctgccgcccgtcgccgcgcgcctccgtgccgttttccctctgttcctccgtgcccttcacccaagacatacatattagcttcggtgcctttccacacgcttggacttagcttattttcggggtcgtgcctgaacctcatttttcggcccgtgcgccatggcgaacccatcgttttcggcccaaacgcaaggccgaacagccatgccgcccgtcgtcgcgcgcctccgtgtcgttttccctccgttccaccgtgcccttcactcaagacatacatacaccttagcttcggtgtctttccattccacacgcttggacttagcctattttcgaggtcgtgccccggtcgccgtttgcggcccgcgcgccatggcgaacccctcgttttcagcctagacgcgtggccgaacagccctgccgcccatcgccaacgttccatcgtgcccttcacccaaggcatacgtaggagcttcggtttctttccacacgctgggacttagcttttcttgtggtcgtgcacgaactcacggcggttttcggcctcttgccacgctgcgccttggacgtttccgttcggaagatcggtgcccctctcccgtgggttcgaaacctagtcgctgggcgctgtgtagagtggggggagggacgaatccgtgcgacgcggggctggatctcagtggatcatggcagcaaggccactctgccacttacaatgccccgtcgcgttttaagtcgtctgcaaaggattcagcacgccgcccgttgggaagggagcttcgaggcggcccgccgcggcgcgtcgaccgggcgggctgagccaatggcacgggcccttggggcgcgaacgccctaacgtgggtcggggcgggcggcgagcagaggcgccggttgctagcttggattctgacttagaggcgttcagtcataatccggcacacggtagcttcgcgccactggcttttcaaccaagcgcgatgaccaattgtgtgaatcaacggttcctctcgtggagcttcggtccgggtcacctttgtccaccaagatggaactgcggccggccgctcattaattaagtcaggcgcgcctctagttgaagacacgttcatgtcttcatcgtaagaagacactcagtagtcttcggcca

SEQ ID NO: 728 - DNA, 13841 bp, Zea mays
  source: /note="Zea mays BAC clone full insert sequence contig bacm2.pk116.g16.fis23"
gtcgttcattattattagaactgtacgtatagatcggggttttggtgtaaagagagggaggcgtaaatgacatgatctagatcagatccgaaaaaaaaaacgacatatagaatacatagcggactgttcggagatgaaggaggacaagggaaagttagtaccaaaggtcatatgcagaaacgaaaaaagcgcgccagagcgcgcagaagtcaggcaagcgcgaaattgcgcaccggacaatctacaggaaatgtcaggtgtgccaccggacatccaggcgggcccagcagtcagagctccaacggtcggaacccaacggcctggtgacgtggatggcgcaccggacactgtccggtgtgcaccggactgtccggtgcaccatgcgacagacagcctccaccaaacggctagtttggtggttggggttataaatacccccaaccaccccacattcaagtcatccaagttttccaccttccaactacttacaagagctagacattcaatacaagacacactcaagtgatcaaatcctctcccaattccacaaaagctttagtgttaagtgagagagatttgttgtgttcttttgagctcttgcgcttggattgctttcttctttctcattctttcttgagatcaatactcacttgtaaccgaggcaagagacaccaattgtgtggtggtccttgcggggaagttttgttcccggttgatttgagaagagaaagctcactcggtccgagggaccgtttgagagagggaaggggttgaaaaagacccggcctttgtggcctcctcaacggggagtaggtttgcgagaaccgaacctcagtaaaacaaatccgcgtgtcacactctttattcgcttgcgatttgttttgcaccctctctcgcggactcgattatatttctaacgctaacccggcttgtagttgtgattaattttgtgaatttcagtttcgccctattcaccccccctctaggcgactttcaacaatcaacccatgctaaattgcctaaaaagaaaactcctagtgcatcaaatgaacatagcattttatttaaaacttttgatgaatcttatgtgttaactaacaaatccggcaaggtagttgccaaatatgttgggggcaagcacaaggggtcaaagacttgtgtttgggtacccaaagttcttgtgtctaatgccaaaggacccaaaaccatttgggtacctaaagtcaagaactaaacttgttttgtaggtttatgcatacgggggctcaagttggattatcgacagcgggtgcacaaaccacatgacaggggagaagaagatgttctcctcctatgagaaaaaccaagatcctcaacgagctatcacattcagggatgaaaaccaaggtttggtcaaaggattgggtaaaattgctatatcacctggccattccatttccaatgtttttcttgcagactctttagattacaatttgctttctatttcgcaattatgtcaaatgggctacaactgtctttttactgatgtaggtgtcactgtctttagaagaagtgatgattcaatagcatttaagggaatgttagagggtcagctatacttggtagattttgatagagctgaactcgacacttgcttaattgctaaaactaacgtgggttggctctagcaccgccgactagcccatgttggaatgaagaatcttcataagcttctaaagggagagcacattttaggattaacaaatgttcattttgaaaaagacaggatttatagcgcatgtcaagcagggaagcaagttggtactcatcatccacacaagaacatcatgacgactgacaggccactggaactcctacacatggacctattcggcccgatagcttatataagcatcggcgggagtaagtactgtctagttattgtggatgattattctcgcttcacttgggtattctttttgcaggaaaaatctcatacccaagaaaccttaaaaggattcttgagacgggctcaaaatgagatcagcttaaggatcaagaaaattagaagcgacaacgggacagagttcaagaactcacaaatcgaaggcttccttgaggaggagggcatcaagcatgagttctcttctccctacaccccacaacaaaatggtgtagtggagaggaagaatagaactctattggacatggcaagaaccatgcttaatgagtagaagacttcggatcggttttgggctgaggcggtcaacaccgcctgctacgccatcaaccggttatatctacaccgaatcctcaagaagacatcatatgaactccttactggtaaaaaccccaatatttcatattttagagtctttggcagcaaatgctttattcttgttaaaagaggtagaaaatctaaatttcctcctaagactgtagaaggctttttactaggatatgattcaaacacaagggcatatagagtctttaacaagtcctctggacaagttgaaatttcttgtgacgttgtgtttgatgagactaacggctctcaagaagagcaagttgatcttgatgagataggtgatgaagaggctccgtgcatcgcgctaaggaacatgtccattggggatgtgtgtcctaaggaatccgaagagcctccaaatgcacaagatcaaccatcctcctccacgcaagcatctccaccaactcaaaatgaggatgaggctcaagttgatgaaggagaagatcaatcaaatgagccacctcaagatgacggcaatgatcaagtgggagatgcaaatgatcaagataaggaggatgaagaaccaaggccgccacacccaagagtccaccaagcaacccaaagagatcaccccgtcgacaccatcctcggcgatattcataagggggtaactactagatctcgtgttgctcatttttgtgaacattactcttttgtttcctctattgagccacatagggtagaggaagcacttcaagattcggattgggtggtggcgatgcaagaggagctcaacaacttcactaggaacaaggtatggcatttggttccacgtcctaatcaaaatgttgtaggaaccaagtgggttttccgcaacaagcaagatgagcatggtgtggtgacaaggaacaaagcccgacttgtggccaactcccaagtcgaaggtttggatttcggtgaaacctatgcacccgtagctaggcttgagtcaattcgtatattattggcctatgctacttaccatggcttcaagctttatcaaatggacgtgaaaagtgccttcctcaatggaccaattaaggaagaggtctatgttgagcaacctcccggctttgaagatagtgagtaccctaaccatgtttacaaactctctaaggcgctttatgggctcaagcaagccccaagagcatggtacgaatgccttagagatttccttatcactaatggattcaaagtcggaaaagctgatccaactttatttactaaaactcttgacaatgatttgtttgtatgccaagtttatgttgatgatatcatatttgggtctactaacgaatctacatgtgaagaatttagtaggatcatgacacaaaaattcgagatgactatgatgggggagttgaagtacttcttaggatttcaagtgaagcaactccaagagggcacctttctaagccaaacgaagtatactcaagatattctaagcaagtttgggatgaaggatgccaaacccatcaagacacccatgggaaccaatgggcatctcgacctcgacacggaaggtaagtccgtggatcaaacggtataccggtcgatgataggttctttactctatttatgtgcatctcgaccggatattatgctttccgtatccatgtgtgcaagattccaagccgaccctaaggaagctcaccttacggccgtaaaacgaatcttgagatatttagtttatactcctaagtttgggctttggtatcctaggggatccacttttgatttaattggttattcgtatgccgattgggcggggtgtaaaattaatagaaagagcatatcggggacttgccagttcttgggaagatccttggtgtcttgggcttcaaagaagcaaaattccgtcgctctttctaccgccgaagctgagtatattgccgcaggtcattgttgcgcgcaattactttggatgaggcaaacccttcgggactatggttacaaattaaccaaagttcctcttctatgtgataatgagagtgcaatccgcatggcggataatcccgttgagcatagccgcactaaacacatagccattcggtatcattttctaagggatcaccaacaaaagggagatatcgagattgcatatattaacactaaagatctattagccgatatctttaccaagccacttgatgaacaaacctttaacaaacttaggcatgagctaaatattcttgattctaggaacttcttttgttgatttgcacacatagctcattcatatacaatcatgtctctttcatgtgctatgactaatgtgttttcaagttaatttcaaaccaagtcataggtatattgaaagggaattggagtcttcggcgaagacaaaggcttccactccgtaactcatccttcgccgtcgctccgagcatctctccggctttggtataatcttcactcatgttttatttgccaaaggggagaaagtagttttagaaagggctctaatgactccgtttttggtgatttatgccaaagggggagagagcatgagcccaaagcaaaaggaccgcacaccaccacctaattttaaaaatgattttcaattggaaatttcaaattggtatcttattgtgttgaaaaggggagaaagtagtattttcaaaatcgatatcaaaaccctcttgaacactaagaggaggatttctttgagagggagttttgtttagttaaaggaaaagcatttgaaacagggggagaaaatttcaaatcttgaaaatgcttcgcaaaatcttattcatttacctttgactatttgcaaaaggactttgaaaaggatttacaaaagaatttgcaaaaacaaaacaagtggtgcaagcgtggtccaaaatgtcaaaaattaaagaaacaatccatgcatatcttataagtatttatattggctcaattcaaagtaacctttgcacttacattatgcaaactagttcaattatgcacttctatatttgctttggtttgtgttggcatcaatcaccaaaaagggggagattgaaagggaattaggcttacacctatttcctaattgattttggtggttgaattgcccaacacaaataattggactaactagtttgctcttgtccggtgagccagcggaacaacggctacttcacgccaacggtcgactggaacgcgcgggtggcacaccggacagtctacaggacttgtctggtgcaccactggacagccaggcgggcccacaagtcagagctccaacggtcggaacccaacggcttggtgacgtggctggcgcaccggatagtgtccggtggcgcaccggactgtccggtgcgccatgcgacagcagcctccaccaaacggctagtttggtggttggggttataaatacccccaaccaccccccacattcaagtcatccaagttttccaccttccgactacttacaagagctctagcattcaattctagacacacccaagtgatcaaatcctctcccatttccacaaaagctttagtgttaagtgagagagatttgttgtgttcttttgagctcttgcgcttggattgctttcttctttctcattctttcttgagatcaatactcacttgtaaccgaggcaagagacaccaattgtgtggtggtccttgcggggaagttttgttcccgattgatttgagaagagaaagctcactcggtccgagggaccgtttgagagagggaaggggttgaaaaagacccggcctttgtggcctcctcaacggagagtaggtttgcgagaaccgaacctcggtaaaacaaatccgcgtgtcacactctttattcgcttgcgatttgttttgcaccctctctcgcggactcgattatatttctaacgctaacccggcttgtagttgtgattaattttgtgaatttcagtttcgccctattcacccccctctaggcgacttttagcaatcaacccatgctaaattgcctaaaaagaaaactcctagtgcatcaaatgaacatagcatttcatttaaaacttttgatgcatcttatgtgttaactaacaaatccggtaaggtagttgccaaatatgttgggggcaagcacaaggggtcaaagacttgtgtttgggtacccaaagttcttgtgtctaatgccaaaggacccaaaaccatttgggtacctaaagtcaagaactaaacttgttttgtaggtttatgcatccgggggctcaagttggattatcgacagcgggtgcacaaaccacatgacaggggagaagaagatgttctcctcctatgagaaaaaccaagatcctcaacgagctatcacattcggggatgaaaaccaaggtttggtcaaaggattgggtaaaattgctatatcacctgaccattccatttccaatgtttttcttgtagattccttatattacaatttgctttccgtttctcaattatgtcaaatgggctacaactgtctttttactgatataggtgtcactgtctttagaagaagtgatgattcaatagcatttaagggagtgttagagggtcagctatacttggtagattttgatagagctgaactcgacacttgcttaattgctaagactaagatgggttggctctggcaccgccgactagcccatgttgggatgaagaatcttcataagcttctaaagggagagcacattttaggattaacaaatgttcattttgagaaagacagggtttgtagcgcatgccaagcagggaagcaagttggtgctcatcatccacacaagaacatcatgacgactgacaggccacgagagctcctacacatggatctattcggaccgattgcttacataagcatcggcgggagtaagtactatctagttattgtggatgattattctcgcttcacttgggtgttctttttgcacgaaaaatcccatacccaagatacattaaagggattcttgagacgagctcaaaatgagttcggcttaaggatcaaaaagattagaagcgacaacgggacggagttcaagaactctcaaattgaaggcttccttgaggaggagggcatcaagcttgaattctcttctccctacacgccacaacaaaatggtgtagtggagaggaagaatagaactctattggatatggcaagaaccatgcttgatgagtacaagacttcggatcggttttgggccgaggcggtcaacaccgcctgctacgccatcaaccggttatatctacaccgaatcctcaagaagacatcatacgaacttctaaccggtaaaaaccccaatatttcatattttagagtctttggtagcaaatgctttattcttgttaaaagaggtagaaaatctaaatttgctcctaagactgtagaaggctttttactaggatatgactcaaacacaagggcataaagagtctttaacaagtcctctggacaagttgaagtttcttgtgacgttatgtttgatgagactaacggctctcaaatagagcaagttgatcttgatgagataggtgatgaagaggctccgtgcatcgcgctaaggaacatgtccataggggatgtgtgtcctaaggaaaccgaagagcctccaaatgcacaagatcaaccatcctcctccacgcaagcatctccaccaactcaaaatgagaatgaggctcaagttgataaaggagaagatcaaagagatgagtcacctcaagatgatggcaatgatcaatgggaagatacaaatgatcaagacaaggaggatgaagaaccaaggccgccacacccaagagtccaccaagcaatccaacgagatcaccccgtcgacaccatcctcggcgacatccataagggggtaaccactagatctcgtgttgcacatttttgtgagcattactcttttgtttcttctattgagccacacagggtagaggaagcactacaagattcggattgggtggtggcgatgcaagaggagctcaacaacttcactaggaatgaggtatggcatttggttccacgtcctaatcaaaatgttgtaggaaccaagtgggtgttccgcaacaagcaacatgagcatggtgtggtgacaaggaacaaagcccgacttgtggccaagggatactcccaagtcgaaggtttggatttcggtgaaacctatgcacccgtagctaggcttgagtcaattcgtatattattggcctatgctacttaccatggcttcacgctttaccaaatggacgtgaagagtgccttcctcaatggaccaatcaaggaataggtctatgttgagcaacctcccggctttgaagatagtgagtaccctaaccatgtctataagctctctaaggcgctttatgggctcaagcaagccccaagagcatggtatgaatgccttagagatttccttatcactaatggattcaaagtcggaaaagccgatcctacactcttcactaaaactcttgaaaatgtcttgtttgtatgccaaatttatgttgatgatattatatttgggtctactaatgagtgtacatgtgaagaatttagtaggatcatgacacaaaaattcgagatgtctatgatgggagagttgaagtacttcttaggatttcaagtgaagcaactccaagagggcaccttcctaagccaaacgaagtatactcaagatattctaagcaagtttgggatgaaggatgccaaacccatcaagacacccatgggaaccaatgggcatctcgacctcgacgatggaggtaaatccgtcgatcaaaaggtataccggtcgatgataggctctttgctatatttatgtgcatctcgaccggatattatgctttccgtatgcatgtgtgcaagattccaagccgaccctaaggaatctcaccttacggccgtaaaacgaatcttgagatatttagtttatactcctatgtttgggctttggtatcctaggtgatgcggacatcaacaccaacacgagcacatctacaccagcagcaccttctctagcccaggcgccaccccttccacctgggccagtgactcgggcccgtgcaagagaattgaactacatcatgttgttaaagaacgaaggcccggaagaatagacgaccaacccaattgcggcccataatggacgacctagggttggccgcccctaggggctgcgccccctctctatttattcaggagctgcgcctcctttattttcctagttttgttttacgttagccttagctactctcgaacacgcgcaaatctgcgctgtcttcgtgtattcagaactccaccctcgagtaatagattagattgctcgcctctttttcttgttcgttcttcgattgcgcacaggaaacgatcttcgtgatcaggccgatctcgcatcagcaaggtcggtaaccacagggagttggttcagcgattgcattggcgcctcgggcttgctcgtcgtagtcggatcgcaagggtcatcttccaccaaatcggaattatctctactcgccgaaagatcgggcacctcagctacatcaattggtatcagatttcctggttgatcggtgagtttatcgagcgttttttttcctacagtccacaaaacctcataaaaattcaggttagatcttatcccatgtaacaccccgaggtccacaaacaccccggaatgctactgaactacacttctgacatctatataaaattttggcagcatcccctttgcaaaattgcataaatgagggggggggacaacagtgtataaacatatatcatgacaaaaacataccaagtattattaatcggctagcaaagggaagttaaacatacgacatgaactgaattaaccagtgcgcacgactagcaaaaaaaataaacttcttttgacaacaagtttctaattaaatcatggctacgcctgggcagcgctattatgagagtgaaagtggacgtgctgctactcccctcattcccaacatgtatcaagtacctgcattgagtaatgcaagagtgagatgacacatctcagcaagtaaaataatatcaaactgtttaaccacataagaatattgttttaccaccacttgatttcacaaccttcttattacaaaggtgcagcacgtatacaacgtacaacactcctagctaccacacctcgcaggtagaaaccacaatagtaacatagtaatgtcactcttcatatatatatacctcatgagtgcaaatgtctgcaaatgcaaggatgacttctgccttcatacctctaaggatatgaagccgcatcgtacccctcctcgggcaacgtacgatgctaaaaatgtaccggtacagtcggaccataagatcacgacataacttcagaatgcaagatggatgatgcaatgtgcatgacatgcctacaacacttcatatagcgtgattcaaaaaaaaatacttcaactccatccatgatgggaatcaaccacatatatcattaccaaatcatgatcatccacaatattagacaattgagaattaatactttcgaacaaataaacttcatcatagaattcaatgattaacatattaaaacttatgcatactcgatgacagggaataggatgcaaaccaaacggtagcaaccaccactgtatttacttgcctttaccggaagtttgggcaaatccctaagtacgatccggaagtccaccacctgtttttgacacacaacttagtgcaccaatttcacataaccaggctcataaacgacgccgcacctacgcacaaactcaaaccccgccgcgggttacatctctccccacacccaccaaactgcagcggcgctgcttaataatttcataacttcaaaattatgacagcattggtaacaaacaaaaactccagaggcatctacataaaattccccacaagttttgtatacaatttataattaaattccaacatctaattagcccaaaacagttcacaagatgcaccctgtaatctgtttttttctcttttggacagcgacatacccggattcaaacagcgatatcttttaaaatataattccaattcaagcgcataagtactcattggaaagataagacaaagccatacatgattatcatactggttagcactaattaaccacgaaaaattcccagaaattgctaatactactgctgttcacccacctgaaaaatctgtttttttttacagcaacatacccggattcaaacagcgatatcttttaaaatataattccaaatcaagcacataagtactcattggaaagataagacaaagccctacatgattatcatactggttagcactaattaaccacgaaaaattcccagaaactgctaatactactgctgttcatccacctgaaaaatctgtttttttggacagcaacatacccggattcaaacaacgatatctcctaaattataactccgaatcgagcgcataagtactcgttggaaaggtatgacaaagctctacatgattatcccactgattcccactaattaccccacgaaaattcccagaaatccctagaactactgctgttcacccactcacaaaattcctggacagcacctctaccgattcgcaaagataaacacataatccaattgattgcagcacaaaaacaacaaaagttaatcacaaattcaccttaggttcttcccttcctccttccttcttcctccctccaaactccaattgagatcgcagccacacgacggagaaccacacgggagggctgcaccttggaggagggggagaaatgggggggcggctagggttttgggtggtgagggctgcaaagatttgaggaggaagaagatggaagaggggggggcgtccaagagaaaggggaggggaagggggcggctgcaacaacccaagggggaaaaaggggggcggcggctagggttagggaagggttagtgggccggattgcgattcgcggcccaactcgcttgcacgacagctcccgaccaaccactctactgctatactggtgaatgttttccataaattctaaatccccaaagcgcgacacccgaataagagaaaaaaacaaacaaaaagaataaccttcaacttctcttctttgcaaaccgggtatcacactctaccccccttaaaaagaattcgacctcgaattccgacgcttctatcggaacgacaaggaaagatcagcgacaacaaaaactcaccccataacgaaaagttcggggtacttctgccgcatcagctcctcgagcttcaaggattctaggatacgcagcagacgacactctagagtcaggtcttgctacatgggaatcgactctagctcgattattgatatggattccgcaaatactttctcaacatagagacatggaatacatggcgtactctgatcatagtctccgacaattgtatgtgctaagccaagctgccaactcgggctaagataatagacagtcctatataacccggacaaagttttcctgacaccaaatcaacattgacacatgcaagtacttcaatgaatatatataatgaaagcaatacatactgtgctccaatatcctaaaccaaacctatccaaacaagagtaacttcaaaagctcaatttaatgcttccatatttctagacatcagcacaacggttaattgttttgctcataaactcacaaagtatgcatccaacagtagtaaactaggactttatggaaagcttacaaagtccactatacccttggtattatcatcaccacaagattttacacttagaaaggacaaacaatgcgaaacgtaaattttgtccagacttggacagaattcaactactcacttaaaaaaatccataattggagtctcagtcatccaatttaggcgctcctagacttttttgaaagccagtaaaattgtctatatttcatttataaacatatcaggttaattcaatgcatatcaaggtcaaaaaacataagaaaggttttgctgtccaaatttggacagattcaaagattccacttaaaacagctgtagcttaacttataggtcaccaaaaagggtaatccaatatttgttggaaatcttaaggaaagtactccacttctttataatttataagaactgattcaaagtttaacttgggcaaacaaggtcagtttcaaaatctgtacagaatctggacagattccaagactagacttgagaaaatcataactcccaaactactagacctatggtcatgaaattttacacaagttctgaaaaagttggctacaacttttttatacaacacctctacagaaaacatggtttaattcattgaactagctgcataaccaaaactggtcatgtagtcccaaacagcaagcaatagatttattcaggttctatactcttctaagattaagcgttcatcgaaggactaataactttaggttcttcattacgagacactcagagccaacataaagatagaagccatatgctaaccttttaaatcattttaagccttatctcacatcatggaagcaagaatcgatttaagcatactacgcctgcccatatatccatccaagcatattctatacattatatcattccatc

SEQ ID NO: 729 - DNA, 716 bp, Zea mays
  VARIATION (15)..(101): /replace="c" or "g" or "t"
  misc_feature (15)..(101): /note="Nucleotides given in the sequence have no preference with respect to those in the annotations for said positions"
  source: /note="Zea mays BAC clone full insert sequence contig bacm2.pk174.e4.fis1"
ccatcgcgcattagaaaaaaaaaaaaaaaaaaaaaaaaaaaaaaaaaaaaaaaaaaaaaaaaaaaaaaaaaaaaaaaaaaaaaaaaaaaaaaaaaaaaaaaccaaaactcatgtttggggtggtttcgcgcaatttcgttgtcgtacgtcaccctttcccaaaatgggagtttttgccaccggaagcaattcttcgtttttcgcaatgaacatgcccaatcctctactttagttccaaaactcatgtttggggtggtttcgtgctatatcgttgccgcacgtcacccattccgaaaacgggtgtcggggtgcatacaaagcacgaatttttgccacccgaaccatttcttcctttttcccaaccaaaatgccccatcccctactttaaggccaaaaacccagtttggggggggtttgccccatttcgttgccccccgtcacccctttccaaaacgggtgttggggggcaaacaaacaccaattttttccccccggaacatttttttcttttttcccacaaacaagccccaacccccaactttagttcccaacttcctttttgggggggtttccccaatttacttgccccccttccccccttccacaaacgggttttggggtggctaaaaaacacaagtttttttcccccgaaacaattctttcttttttgcaaaaaaaagccccaatcccgctatttgggccaaaccccgatttgg

SEQ ID NO: 730 - DNA, 804 bp, Zea mays
  source: /note="Zea mays BAC clone full insert sequence contig bacm2.pk174.e4.fis2"
tgggtgacgtgcgacaacgaaattatgcgaaaccaccccaaacatgagttttggacctaaagtagtggattgggcatgttcgttacgaaaaacgaagaaatggttccggtggcaaaaactcgtgctttgtatgcaccccgacaaccgttttcagaatgggtaacgtgcggcaacaaaattgtgcgaaaccacccccaacatgagttttgtacctaaagtagtggattgggcatgttcgttgcgaaaaacgaagaaatggttccggtggcaaaaactcgtgctttgtatgcaccccgacacccgttttcggaatgggtgacgtgcgacaacaaaattgcgcgaaaccaccccaaacatgagttttgtacctaaagtagtggattgggcatgttcgttgcaaaaaacgaaaaaatggttccggtggcaaaaactcgtggttttatgccccccacaccccttttcggaaagagtgaagtgcggcaacaaaattgcgcgaaacaccccagacatgagttttggacctaaagtagtgcattgggcaggttctttgcgacaaacaaaaaaatggtgccggtggcgaaaactcgtgcttttatgcaccccacaccccttttctgaatggatgacatgtgacaaccaaattgcgcgaaacaacccccaacatgcgttttgtaccaacaatacatggatagggccggttcgttgcgaaaaacaaaaaatggttctgggtggcgaaaacacaggctttggtttgcccaccccacaccttttttcgaaaggggggagggccacaacaaatttctg

SEQ ID NO: 731 - DNA, 801 bp, Zea mays
  source: /note="Zea mays BAC clone full insert sequence contig bacm2.pk174.e4.fis3"
attgctgatttgttctttcgtgaaattgttcgcttgcatggtgtgcccaacacaatcgttttttatcgtgatgctaaatttcttagtcatttttggaggactttgtgggcaaaattggggactaagcttttattttctactacatgtcatcctcaaactgatggtcaaactgaagttgtgaatagaactttgtctactatgttaagggcagttctaaagaagaatattaagatgtgggaggactgtttgcctcatgttgaatttgcttataatcgatcattgcattctactacaaagatgtgcccatttcagattgtatatggtttgttgcctcgtgctcctattgatttaatgcctttgccatcttctgaaaaactaaattttgatgctactaggcgtgctgaattgatgttaaaactgcatgaaactactaaagaaaacatagagcgtatgaatgctagatataagtttgctagtgataaaggtagaaaggaaataaattttgaacctggagatttagtttggttgcatttgagaaaggaaaggtttcctgaattgcgaaaatctaagttgttgcctcgagccgatggaccgtttaaagtgctagagaaaattaacgacaatgcatataggctagatctgcctgcagactttggggttagccccacatttaacattgcagatttaaagccctacttgggagaggaagttgagcttgagtcgaggacgacacaaatgcaagaaggggagaatgatgaagacatccacactactgatacatctatgccaatacaagtacca

SEQ ID NO: 732 - DNA, 1475 bp, Zea mays
  source: /note="Zea mays BAC clone full insert sequence contig bacm2.pk174.e4.fis4"
ctgatacatctatgccaatacaagtaccaatttctggtcccattactcgcgctcgtgctcgtcaactcaaccatcaggtgattacactcttgagttcatgtccatcatatttagaccatggagacccgtgcactcttgttttgcttaggaaccagggagaagaccgaaagggaaaaggatttgaacatgctggattcagactgcagaagaacaccaactagtgatggtcaccacggtcagatgcgggcacggattggaatgttcaagcacaacatggaaagcttatcaagtctactttcatatggatccggaattatagtcatatctgttctgaggccgccgtaatcattgttttcttaccgagacatttcctgccttttctgcccatggtgctgcgtcaccctattttggcccaatgggtcgtgtatcaagttaggtccattagggacgcatcctagggttgcagcacgaccccaatacccttatggtcgtcctcccatgtttataaaccccctagccaccaccaagaacagcgggttttgtttagatcaagtttagctctcgctacttgcttgtaagcgcgcgtgctagtcagccgcccgtcttcttgtcttcataaccccaccatattggggtttgattttgaaacctacatttagatctggtaattcagtacttgttctacttgttcttgctagttcttcgattgcttgcaggacgagtgccctagtggccagggtgtcacgctccacaagatcgtgacagccataggaggtggtgtatcggttgctaaggcgcagcgtcttgggaaggctgtagtcgggccgtgaacgtcgtcttctccaccaatcgagttattccacaccctctcatcgaaagatcgggcaatcacccaacgggtgcacatcacccgttttcggaatgggtgacgtgcggcaatgatatagcgcgaaacaaccccaaacatgagttttggacttaaagtagtggattgggcatattcgttgcgaaaaacgaagaaatggttccggtgtaaaaaactagtgctttgtatgcacccgtacccgttttcggaatgtgtgacgtcccacaacgaaattgcgcgaaaccaccccaaatatgagtttttacctaaagtagtggattgggcatgttcgttgggaaaaacgaagagttggttccggtggcgaaaactcgtgctttgtatgcaccccgacacccgttttgggaatgggtgacgtgcgacaacgaaattgcgcgaaaccaacccaaacatgagttttggacctaaagtagtggattgggcatgttcgttgcgaaaaacgaagaaatggttcctgtggcaaaaagtcgtgctttgtaccgacacccgttttgggaatgggtgacgtatggcctgtctcttatacacatctcaaccatcatcgatgaattttctcgggtgttctcgcatattggctcgaattcgagatcga

SEQ ID NO: 733 - DNA, 1677 bp, Zea mays
  source: /note="Zea mays BAC clone full insert sequence contig bacm2.pk174.e4.fis5"
tccaaaaacgggtgtcggggtgcatacaaagcacgagtttttgccaccggaactgatgaagctaaggtgcccgatctttcggcgagtagagataattccgatttgtcggaagatgacccttgcgatccgactacgacgagcaagcccgaggcgccaatgcaatcgctgaaccaactccctgtggttaccgaccttgctgatgcgagatcggcctgatcacgaagatcgtttcctgtgcgcaatcgaagaacgaacaagaacaagatgcgagcaatctaatctattactcgagggtggagttctgaatacacgaagacagcgcagatttgcgcgtgttcgagagtagctaaggctaacgtaaaacaaaactcaggaaataaaggaggcacagctcctgaataaatagagagggggcgcagcccctaggggcggccaaccctaggtcgtccattatgggccgcaattgggctggtcgtctattcttccgggccttcgtactttaacaacatgatgtagttcaattctcttgcacgggcccgagtcactggcccaggtggaaggggtggcgcctgggctggagaaggtgctgctggtgtagatgtgctcgtgttggtgttgatgtccgcatcatcctccccttcttgaactgaagtcgtcctcgacggcaactcctcatcttctcccgcatacggtttcaaatctgcaacattaaaactagtggaaacaccaaactccgcaggtaggtcgagggtataagcattatcattaatcttggttagtatcttaaaaggaccagcagcacgaggcatcaatttagaacgacgcaaagtaggaaaacgatcctttctcaaatgcaaccaaaccatatcaccaggttcaaaagtaacatgttttcttcctttactaccagcaacctgattttttgtattagtagcagcaatgttctgtttcgtttgttcatgtatggtaatcatttgttcaacatgtgcagaagcatctacatgtggggcgttcgcagcattaagtgaaatcaaatcaataggtgccctaggaatgtaaccataaacaatctggaaagggcacatctttgtagaagaatgcgtggcatgattgtaagcaaattcaacatgaggcaagcaatcctcccaacgtcgcaaattcttgtctaaaacagccctaagcatggtagataaagttctatttactacctcagtttgtccatcagtttgagggtgacaagtagtgctaaacaacaatttagttcccaatttattccaaagagatctccaaaaatggcttagaaacttagcatcgcgatcagagactattgtttttggaataccatgtaaacgaataatttctctaaagaacaattcagcaacaatgctagcatcatcagttttatgacaaggtataaagtgagccattttagagaatctatcaacaaccacaaaaatactatccctccccttcttagttctaggcaagcccaaaacaaagtccatagagatatcaagccaaggagaagaagggacaggcaaaggcatatacaaaccatggttgttcaaccgtgacttacctttctgacaagtagtgcagcgtgcaacaacgcgctccacatcagcgcgcatccgagccaaaagaagtgggcagccaacacctcatgtgtcttgtaga

SEQ ID NO: 734 - DNA, 2648 bp, Zea mays
  source: /note="Zea mays BAC clone full insert sequence contig bacm2.pk174.e4.fis6"
gtgtgtagattgtcgagcaattaataacattaccatcagatatcgtcatcctatccctaggttagatgatatgctggatgaacttagtggctcaatgattttctctagaattgacttacgtagtggatatcaccaaattcgcatgaagctaggggatgaatggaaaacggcgtttaaaaccaagtttggtttgtatgagtggttagtcatgccttttggtctcactaatgcacctagtactttcatgagattaatgaatgaggttttacgtgctttaattggaagatttgtggtcgtctacttcgatgacatcttgatctatagcaaatgtctagtagaccatcttgatcatctacgtgttgttttcaatgctttacgtgaagcacgcttatttggtaaccttgacaagtgcacattttgcacagaccgtgtctcttttcttggctatgttgtgacaccgcagggaattgaagttgatcaggctaaggtggaggccatacatagctggccagtccctaccacggtcacgcaagtccgaagctttctcgggcttgcggggttctatcgtcgatttgtgaaagatttcagcaccatcgcagggccattgcacgagcttactaagaaaggtgctccattttcttggggcaaggcgcaagaggttgcatttgaaacattgaaggataggttaactcatacaccccttctccaattacctgatttcagtaagacttttgaattggaatgtgatgctagtggtattggtttgggtggtgtcttgttgcaagaagggaagcctgttgcttattttagtgagaaactgaatggacccagtctgaactattccacttatgataaagaattatatgccttagttcgaactttggaaacatggcaacactacttatggcctaaagaatttgttatacattctgatcatgaatctttaaagcatctaaggagccaaacaaatctgaaccgtaggcatgccaagtgggtcgaatttattgaatcttttccctatgtcatcaaacataagaaaggaaaagataatgtcattgcagatgccttgtctcgccgttataccatgctgtctcaacttgattttaagatttttggcttggaaacaattaaacaacaatatgttttcgatgctgatttcaaagatgtgctattacattgtaaagaaggaaggacatggaacaaatttgttctcactgatggctttgtgtttcgggctaacaaattatgcattccagctggttccgtgcgtatattattattacaggaagcacatggcggtgggttgatgggacactttggtgtgaagaagacagaagacatcctggccagccatttcttttggccgaagatgagaagagacgtggagcgatttgttgctcgctgcactacatgtcaaaaagctaagtctcgccttaattcacatggtttatacatgcctctcccagttcctagtgcaccatgggaggatatttctatggactttgttttaggactacctagaacaaagaaggggagggatagtatttttgttgttgtggacagattttcaaaaatggcacactttataccatgtcacaaaactgatgatgctacccatgttgctgatttgttctttcgtgaagttgttcgtttgcatggggttccaaacactattgtgtccgatcgggataccaaatttcttagtcatttttggaaaacgttatgggctaagttgggaactaaattgctcttttctactacttgtcaccctcaaaccgatggacaaaccgaagtcgtaaaccgtagtttatctaccatgcttagggctgttctgaaacataacatcaaattgtgggaagaatgtttgcctcacattgaattttcttataatcgttctcagcattctacaactaaactatgcccttttaaaattgtgtatggttttgtccctcgtgctcctattgatcttatcgccatcccacattctgaaataatgaattttgatgcttctcgtcgtgctgaactgattataaagctgcatgaacaaactaaagcaaatattaaagccatgaatgctaagtatgaagaagcaggtagcaagggtagaaagcatattacctttgaacctggtgatttagtatgggtgcatttaaggaaagatagattccctgatatgcgcaaatctaaattacaaccaagagctgctggacccttcaaagtgcttcacaaaattaatgataatgcatataaagttcagttgcctgcagattttggggtcagttcctcttttaacattgcagatttaacaccatacttgggagagaatgacacgtttgagtcgaggacgactttgttgcaagaaggggaggatgatgaggacatcactatcattgatacaaccataccagtgaccacttcaccattcgtagctaatcaaggaccaatgacacgagcccgtgcacgtaaacttaattatcaggtgaactcgttctttgctattgaagctaattcttctttaaatgaggtactaaagccttgcgatgactttattatgctcaggtgtttgggaggtgaaccgtcttggactggagaaaggcaacaaggcaataaaggctgctgcacccgagaggatttcgtaacagcaccaa

SEQ ID NO: 735 - DNA, 3458 bp, Zea mays
  source: /note="Zea mays BAC clone full insert sequence contig bacm2.pk174.e4.fis7"
gagtgcagcctacccaaaactccacatatttctacgacgagaaggtttctgtttctccaggcaatcgctcatccaatctttcaccggttccacctgttggttgcagttcaccactgtggcttggtaagaacggataagaacttgataacagcactagtgtgagcgccttgtgagcagtacacccctgtttttgtcgttggtttttttttctccttttggtgttttggtgtttgcgctaactatggcaggagcacacgacatggtggatgcccagttgcaggaagtacggggacaagttgatggacttgctgctgacattaggacgatgcatgaacggcttgattcaacgatcacttcgacgaccgagcgtttcaaccaacttgaccttgctcaaacggcgactcgcaccacactcgacaccatcctggcacgccttgatgcattgaccacaaagatggagcaggaatacggcggtgacactgagctggacgatggagatcgccgtggtcgtgcacgtcgtgtggttcgtcatccccctaatgacttattttctaagattaaatttaaaattccatcttttaatggtaaatatgatcctgctgcatatcttgattgggaattggaggtagaacagaaattttcatgccatgatattcctgctaatagccaagtgaaggctgccattagtgaatttactgattttgctttaatttggtggcgtgagtataaacaaaaacttcccattaacagtgtcactacttggacccaattaaaaactgccatgcgccacagatttgttccttcctattatgctcgtgatttgcttaacaaaatgcagcgttttcaacaaggttcactatctgttgaggaatattaccaggagttacaaaagggtatgcttcgttgtggtttggttgagtcagatgacgctgctatggcgcgttttcgtgggggtttgaacagggaaattcaggatatacttgattataaggattattttgatataaccacattgtttgaatatgcttgcaaagctgaacgtgaagtgcagggacgacgatcaaagacatatactaactcttttgcaggccggggtccaacacacaactcaactccttccagccctgcaccttctacgcctagcactacatcgcgcacagggacgaccaagccagtggcgctccctgccaaaggcgccgcttcttccacaggacgtacacgagatattcagtgccatcgttgcagagggtttgggcacatgattcgggactgcccaaacaagcgtaccttgcttatacgtgacaatggtgagtactcttcagccagtgattctgaggaaactagtcatgctatgattgccactaaccatgcagaaaatgaggaagtccacgttgatcccatcgacgccgataggtatgagagtcttgttgtgcagcgtgttctcagcacacaggttgcccaggccgaaaaaaatcagcgacacactctattccataccaagggcgtcgtgcacgaacggtcgattcgcatcatcatcgatagtggcagctgcaacaatttggcaagtacagcgttggtagagaaattatccttgcccactcgcacacatccacatccgtatcacattcaatggcttaatgatggtggtaaaataaaggtaacacgttcggtacgtgtccccttttcgctgggttcttattctgattatgctgattgcgatgttattcctatggaagcatgctctttgttattaggtcgaccttggcaatatgatactgatactttacatcatggtcgttcaaatcattattctttcatgtttaaaggccagaaaataattatacatccaatgacccctgaccaaattttgaaagatgatcttactagggctgctaaaactgcacaacaagtcaaatcgacatcagccgcacctattaaatctgaaatcaagttgcactctcctgttttacttgctacacgtgctgattttgatgatctccatgaagctcatatgccctgttatgcacttgtatgctcgcgaatgcttgttccgcttgatgatgcaccgtctttggatataccccctgctgttgttaaccttttgcaggagtatgctgatgtttatcctacagacttaccaccgggtcttcctcccctccgtggcattgagcatcagatcgatctcatccccggcgcttctcttcctaaccgcgccccgtaccgtacaaatccagatgagacgaaggagatccagcgccaggtgcagacactgcttgataagggttacattcgtgagtctcttagcccttgctcggttcctgttttactcgtcccaaagaaagatgggtcatggcgtatgtgcgtagattgtcgtgctattaataacatcacagttcgttatcgatatcctattccacgccttgatgatatgctagatgagcttagtggtgccgttattttttctaaggttgatttgcgtagcggttaccatcagattagaatgaaactcggtgatgaatggaaaacggcttttaaaacgaaatttggtttatatgaatggttggttatgccatttggattgactaatgctcccagcacctttatgcgtttaatgaacgaagttctacgggccttcataggtttgtttgttgttgtttatttcgatgatatccttatttacagcaagtctatagaggagcatttagaacatttgcgtgctgtttttgacgctttgcgtgctgctcgcttgtttggtaacatggaaaagtgcacattttgcacgcaacgtgtctcgtttcttggttatgtggttactccgcagggcattgaggtggatagcagcaagattgctgccattcgggagtggcctacaccgacgacggtcacacaaattcggagctttcttggacttgccggtttctaccgcagatttgttcgtgattttagctccattgcagcgcctctacatgagcttacaaagaaagatgtgtcgtttgcttggagtgattcgcaggaggtagcgttcagcactttgaaagataagttaacccaagctcccctattgcaattgcctgattttaataaagtgtttgagcttgaatgcgatgctagcggtattgggctaggtgctgttttgttacaagaaggaaaaccagttgcttattttagtgaaaaattaagcggtgctagcctgaaatattctacttatgataaggagctttacgctttagtgcgcactttgcatacatggcagcactatctttggcatcgtgagtttataatccattctgatcatgaggctttaaaacatattcgtacccaaacaaatctgaaccgtcgtcatgctaaatgggtaaaattcattgagtcctttccttacattattaaacaacgaacatgcccaatccactactataggtccaaaactcatgcttggggtggtttcacgcaaatttatg

SEQ ID NO: 736 - DNA, 3565 bp, Zea mays
  source: /note="Zea mays BAC clone full insert sequence contig bacm2.pk174.e4.fis8"
gaagcccctgggatgaggtcaatctgatgctcaattcctcttatcggtggcaggccaggtggcacttcgtttggaaatacatcagcatattcctgcaaaagattagtgacagtagaaggcaaagtagatggtatgttgtgaagtgagaacaaagcatccttgcaaataaatacatagcagattgaagcaacatcatttaattcaagcaaatcagatttggaagcaagaaaacaagcacttttcagttgtatttctgtcttcctcacttgagtagatttagaattgtcactcttatgttgtaccaactcctttgcagcacctagatttttattatgaacagatttatttttctctttgcaagctctagcaacttcatccttcaaaatagcatcgggggacatggggtgcaatacaagcttcttctcattatgcataaaagagtagtgatttgttttaccatgatgcacggtgtccttatcaaattgccatggtctaccaaataacatagagcaagcttgcataggtaccacatcacaatcaatataatcatggtatgaaccaattgtaaattccacacggaccatacgtgttaccttaagcttaccactgtcgttgaaccattggatgtagtaggggtgtggatgtggaagcgttttcagccgaagcttctctaccatggtggtgcttgctaagttgttgcagcttcctccatcaattataatacgacaagatcgttccaaaactacacatttagtttggaacaaattgtgtcgctggttttgttcagctttaataatttaggcactcaagacacgtcttacaacgaggctctcatagtgttcagcatgttcagccccaatatgctcttcatcatcatgctccttttcagcatcttgggcagcaagcatggcatatgtatcattatctaaatcgctggctgatgagtactcaccattttctcttataattagtacacgcttactttggcagtcccttcgaatgtgcccaaatcctttgcattggaggcattggatgtcctttgttcttcccgtggaagcaatagaagaatatttggctacagcttgggaggatcctttccctgtctcaatagcacgagaaggtgctgatttcgatggtgttgtggatgatctattggaagcatctccctgaaacacatggttagagctagcagcactagtgcggggctgccaagatgtattgcgacctgcataagtgttagttctcaagcatcgtccctggacttctctttcagccttacaagcaagatgaaataagcgagtaacattagtgtattccttgtaagctaatatatcctgaatttctcttgtcaaaccacccatgaacctagccattgcagcttcttcattttctacgagaccacacctcaacatgcctatttgtaattgttgataatactcttcaacagatttgttgccttgtctaagctgttgtaatttatgtaataaatcacgagcatgataggaaggaacaaaacgactacgcatgattctttttaaagcattccaagtttgtggtatggtagctagatgtgtagtttggtactcatgccaccaaatagaagcaaaatcagtgaattcactcgtagcagctctaacctttttatcatcagaaaaatcatagcatgcaaatttttgatctaccgacaattcccatgttagatatgcatcaggatcatattttccatcaaacgatggtatggagaatttaattcttcctagagaatcatcattttcatgtacctcacgtcgtggaggtcgaccacccaagccatggcgatcacgtcgttggtgtcgtcggtgcctaatagatcggtcatcacgctcggtgtctgctgaatactccgtagcatcatctcttgcggtaccagcaatggaaccatagccatcatcatcaccttgttgcctactttcacgcccaacttggtccatcctatctaagcgctcaataattgctgcaagagaggtgttagtagcagcaactgtttgttccaaagtggtcaatgtgttgttggtaacaatttgtgctgtttctaattgaccaatgcgctcattggtgacttgaacatcttcattgagggcatctgtgtgcaaccttacttgacgttcgaaatgttgaatgatgcccactgttcgtggagaatgtggaggtcgcgcatttgcatcctctgccatggttagtgcaaaagagatacaaaaacaagtaatgcagcctagtagttgctatgatgtggatggataaacactgcctcactagcaagaaatcaagctcttacaagttctcaccacgcaaagcaagtggcgctggcaaacagcaagaacaacaacagtggctgctagcacaacctggtggtgttgtagaaaaatttgtggatttataggtggctgctaaaacaatagttccaaggaatagctagtaccacattagccacaacaagttgaataaacgttccacaatggtgttgtgctggtcctagtccaaaccgtaatagagacgcgagccgttacacaaatgatatcaccaaatactcaaaacagcacgctgacttagaaaattgtcaaacggtggcacataaactgtctttgttttgttgcacatggaattttatctaccaatattcttactgcgattttttttctcttttttgtacgtgcttttttttatcagcgcgactttttttgtgcacttgccttttccttttccttgtttttttgatctacagctagcgaacagctagagaactaaaaatggtgatctaaacaaggtggcacaaatgcagcaaccatgaattcaacaagtcgaaaactaagtagtaaagcaaaggctcaaaatgtttttaggtgattttctgctctaaatatatctttggcaaaagtggactgtaggtaaataaaataaggaagatggagatctctcaccgagcaacctgaaatttgataccacttgataaacccaacgggtagaagggtgcccgatctttcgatgagagatgatagaggtggaaaacttgttggagaacgacgttggctgcccgactaccacaaccaagatggtgtggcgccttgagcgacaggtacaccgtctcctgataactacgatttggggtggaggtcgacgttgtgctatccgactacaacaaccacaagggtgttgcgccttagcgatagttacaccggctcctgttgttgctgctcttgccgtgccaagaacagccttgaacctgcaagcaatcgagaacaagcaagaacaagataaaacgcagacgctcacggatctgatagagttggggttctgtttcaagtatccgggtggtctagccgacacacgcgtttacaaggaagtagcaaaggctaaacttacatcaaacaaaacccaagttctttggtggctgctagttgcttaaatagagaaataggaagaaggaattctggtggagtcatgaagttccctcggcagtttctggacgcctcgggtgtagtctcccattaattcttgatccaccagcaagtagacgaagggagctttc

SEQ ID NO: 737 - DNA, 3707 bp, Zea mays
  source: /note="Zea mays BAC clone full insert sequence contig bacm2.pk174.e4.fis9"
gacggccagtgccaagctcagatcagcttgcatgcctgcagtgcagcgtgacccggtcgtgcccctctctagagataatgagcattgcatgtctaagttataaaaaattaccacatattttttttgtcacacttgtttgaagtgcagtttatctatctttatacatatatttaaactttactctacgaataatataatctatagtactacaataatatcagtgttttagagaatcatataaatgaacagttagacatggtctaaaggacaattgagtattttgacaacaggactctacagttttatctttttagtgtgcatgtgttctcctttttttttgcaaatagcttcacctatataatacttcatccattttattagtacatccatttagggtttagggttaatggtttttatagactaatttttttagtacatctattttattctattttagcctctaaattaagaaaactaaaactctattttagtttttttatttaataatttagatataaaatagaataaaataaagtgactaaaaattaaacaaataccctttaagaaattaaaaaaactaaggaaacatttttcttgtttcgagtagataatgccagcctgttaaacgccgtcgacgagtctaacggacaccaaccagcgaaccagcagcgtcgcgtcgggccaagcgaagcagacggcacggcatctctgtcgctgcctctggacccctctcgagagttccgctccaccgttggacttgctccgctgtcggcatccagaaattgcgtggcggagcggcagacgtgagccggcacggcaggcggcctcctcctcctctcacggcaccggcagctacgggggattcctttcccaccgctccttcgctttcccttcctcgcccgccgtaataaatagacaccccctccacaccctctttccccaacctcgtgttgttcggagcgcacacacacacaaccagatctcccccaaatccacccgtcggcacctccgcttcaaggtacgccgctcgtcctccccccccccccctctctaccttctctagatcggcgttccggtccatggttagggcccggtagttctacttctgttcatgtttgtgttaaatccctgtttgtgttagatccgtgctgctagcgttcgtacacggatgcgacctgtacgtcagacacgttctgattgctaacttgccagtgtttctctttggggaatcctgggatggctctagccgttccgcagacgggatcgatttcatgattttttttgtttcgttgcatagggtttggtttgcccttttcctttatttcaatatatgccgtgcacttgtttgtcgggtcatcttttcatgcttttttttgtcttggttgtgatgatgtggtctggttgggcggtcgttctagatcggagtagaattctgtttcaaactacctggtggatttattaattttggatctgtatgtgtgtgccatacatattcatagttacgaattgaagatgatggatggaaatatcgatctaggataggtatacatgttgatgcgggttttactgatgcatatacagagatgctttttgttcgcttggttgtgatgatgtggtgtggttgggcggtcgttcattcgttctagatcggagtagaatactgtttcaaactacctggtgtatttattaattttggaactgtatgtgtgtgtcatacatcttcatagttacgagtttaagatggatggaaatatcgatctaggataggtatacatgttgatgtgggttttactgatgcatatacatgatggcatatgcagcatctattcatatgctctaaccttgagtacctatctattataataaacaagtatgttttataattattttgatcttgatatacttggatgatggcatatgcagcagctatatgtggatttttttagccctgccttcatacgctatttatttgcttggtactgtttcttttgtcgatgctcaccctgttgtttggtgttacttctgcaggtcgaccgccggggatccacacgacaccatgtcccccgagcgccgccccgtcgagatccgcccggccaccgccgccgacatggccgccgtgtgcgacatcgtgaaccactacatcgagacctccaccgtgaacttccgcaccgagccgcagaccccgcaggagtggatcgacgacctggagcgcctccaggaccgctacccgtggctcgtggccgaggtggagggcgtggtggccggcatcgcctacgccggcccgtggaaggcccgcaacgcctacgactggaccgtggagtccaccgtgtacgtgtcccaccgccaccagcgcctcggcctcggctccaccctctacacccacctcctcaagagcatggaggcccagggcttcaagtccgtggtggccgtgatcggcctcccgaacgacccgtccgtgcgcctccacgaggccctcggctacaccgcccgcggcaccctccgcgccgccggctacaagcacggcggctggcacgacgtcggcttctggcagcgcgacttcgagctgccggccccgccgcgcccggtgcgcccggtgacgcagatggatccaccggtcgccaccatggcctcctccgagaacgtcatcaccgagttcatgcgcttcaaggtgcgcatggagggcaccgtgaacggccacgagttcgagatcgagggcgagggcgagggccgcccctacgagggccacaacaccgtgaagctgaaggtgaccaagggcggccccctgcccttcgcctgggacatcctgtccccccagttccagtacggctccaaggtgtacgtgaagcaccccgccgacatccccgactacaagaagctgtccttccccgagggcttcaagtgggagcgcgtgatgaacttcgaggacggcggcgtggcgaccgtgacccaggactcctccctgcaggacggctgcttcatctacaaggtgaagttcatcggcgtgaacttcccctccgacggccccgtgatgcagaagaagaccatgggctgggaggcctccaccgagcgcctgtacccccgcgacggcgtgctgaagggcgagacccacaaggccctgaagctgaaggacggcggccactacctggtggagttcaagtccatctacatggccaagaagcccgtgcagctgcccggctactactacgtggacgccaagctggacatcacctcccacaacgaggactacaccatcgtggagcagtacgagcgcaccgagggccgccaccacctgttcctgtagcggccggccgcaacctagacttgtccatcttctggattggccaacttaattaatgtatgaaataaaaggatgcacacatagtgacatgctaatcactataatgtgggcatcaaagttgtgtgttatgtgtaattactagtctgcagcatttggctaccttaagagagtcatagttatagctcgagcggccagcttgatatcgaattcgcccttagggtttagggtttagggtttagggtttagggtttagggtttagggtttagggtttagggtttagggtttagggtttagggtttagggtttagggtttagggtttagggtttagggtttagggtttagggtttagggtttagggtttagggtttagggtttagggtttagggtttagggtttagggtttaggg

SEQ ID NO: 738 - DNA, 3981 bp, Zea mays
  source: /note="Zea mays BAC clone full insert sequence contig bacm2.pk174.e4.fis10"
gaatcattatcccacaaatcttcactatcacaagtgtcagcaatcaattcttcttgtgatgatggaaaaacaacagctggtttcattattttgtgttcttgatcagcatgtagagcagatgcaaaagaggaactatggctcacatgttcagtgcatgtataattgtataatagaatctcattttcagctttacatgcaagcaaaaacaagtgagaaatgtgtttgtatgcttcatgcatgactatagtctgaatttcagaattgagtcctttcatgaacctagtcatgacatcttccatgcattcatctaaacgagcaaacatggtacaaattttaaaatcataataataatctttcacagtcctagcaccctgctttaaggtgtctaatttagaaagcaaatgatcagcatagtatgcaggaatgaatgcatctctaaaatgaagtttgaagtcttcccaagattgtggaactttgttgtgcctacaaatgtatttccattccatcaatgcgtgctcagttaacaaattagaggcaatataaatcttttgtttttgagatagatcatgcttatcaaattctttatctacctttagctcccaatcaatgtatgcatgaggatcgaatttaccggcatataaaggcaagtgttgaatgatgcctccaatataacgttcggttgggtcaaaaatgtccatatcacctgccatgtttagtaaaacaagaaacaataaaaaatatctttgattctataaactactaggaatcattgttgtaatctctcactctcaaactggttaaacaagttcttacaagttctcaccacgcaaagcaggaggcgctggcaaacagcacgaacaacaacaacagtggctgctagcacaacctggtggtgttgtagaaaattttgtggatttataggtggctgttaaaacaatagttccaaggaatagctagtaccacgttaaccacaacaagttgaataaacgttccacaatggtgttgtgctggtcctagtccaaaccgtaatagagacgcgagccgttacacaaatagtatcaccaaaagctgagaacagcaatctgatttctgaaactataaaaaaaagacacacaaactgccttttgttttattgcacttacaaattttatctaccaaaattcagaactggtttttttctctctcttttttttgcacgtgtctttttttattttgctgattagtgcggctttttttatgcactcgccttttgctttctcttctttttggttgaattgcagcaagaggtctaaactggtgattgaaacaaggtggcgcgaactcgaaactctagcggtaagaaaactttagaccagcaactcgacccaaatgcagcaaccgtgaattcaacaagtcgaaaactaagtagtaaagcaaaggctcaaactgtttttaggtgaatttatgatctaaatatatctttgggcaaaagtggactgtaggtaaataaaacaaggaagattgagttctctcaccgagcaacctggctttgataccacttgataaacccaacgggtagaagggtgcccgatctttcgatgagagatgatggaggtggaaaacttgttggagaacgacgttggctgcccgactaccacaaccaagatggtgtggcgccttgagcgacaggtacaccgtctcctggtaactacgatttggggtggaggtcgacgttgtgctatccgactacaacaaccacaagggtgctgcaccttagcgatagttacaccggctcctgttgttgctgctcttgtcgtgccaagaacaaccttgaacctgcaagcaatcgagaacaagcaagaacaagataaaaagcagacgctcacggatctgatagagttggggttctgtttcaagtatccgggtggtctagccgacacacgcgtttacaaggaagtagcaaaggctaaacttacatcaaacaaaaacccaagttctttggtggctgctagttgcttaaatagaggaatagaaaggagttctaatggagaacgaaactctctcggcagtttctggatgcctcgtttgggttctgtcattgattcttgatgcacatgaaagtagacgaagagagctttccaacaagtagttatttgcactaaacaaccttgggagtggaaagttatgctccatttaatttggtgcatgctgcagttacgaaattgacttgggtagagcaggagttcactcggcagtttctggacgcttagtgtctctcgttgattcttgatccactaaaaagtagatgaagagaactttccaacaagtgcttatttgcattaaacaaccttgggagctgaaagatatgccctcttaaacttgcacttgttgtagtttcgaaatcccctcaagtggagcagcttttattgccttgttgccttctcaaattctagatggttcacctcccaaacaccttagaataataaagtaatcacaaggtatcagtacctcatttaaggaatgattagcttcaacaacaaggaacgagttcacctgataattaaatttacgtgcacggactcgtttcactggtccatgattaaatggtgaaggaggtcgctggtgtggtgtattgatgacagtgatgtcctcatcacccgttttcggaatgggtgacgtgcagcaatgaaattgcgcgaaaccaccccaaacatgagttttggacctaaagttgtggattgggcatactcgttgcaaaaaacgaagaaacggttccggtggaaaaaactcgtgctttgtatgcaccccgacacccatttttggaatggcggacgtgcggcaacgaaattgcgcgaaaccacaccaaacataagttttggacctaatgtagtggattgggcatgttcgttgcgaaaaacgaagaattggttctggaggcaaaaactcgtgctttgtattcaccccgacacccgttttcggaatgggtgacgtgcggcaatgatatagcgtgaaacaaccccaaacatgagttttggacctaaagtagaggattgggcatgttcgttgcgaaaaacgaagaaatggttccggtggcaaaaactcgtgctttgtatgcaccccgacacccgttttggaaatgggtgacgtacaacaacaaaattgcgtgaaaccaccccacacatgagttttggacctaaagtagtggattgggcatgttcgttgcgtatagcaaagaaatggttccggtggcaaaaactcatgctttgtatgcacccgacacctgttttcggaatgggttacgtgcggcaacgaaatttcgcgaaaccatcccaaacatgagttttggacctaaagtagtggattgggcatgttcgttgcgagaaacgaagaaatggttccggtggcgaaaactcgtgctttgtatgcacacgacacccgttttcggaatgggtgacatgcggcaacgaaattgcgcgaaaccaccccaaacttgagttttggacctaaagtagtggattgggcatgttcgttgcaaaaaacgaagaaatgattccggtggcgaaaactcgtgctttgtatgcaccccgacacccgttttcggaatgggtgacgtgcggcaacgaaattgcgcgaaaccaccccaaacatgagttttggacctaaagtagtggattgggcatgttcgttgcgaaaagcgaaaaatgcttccggtggcaaaaactcgtgctttgtatgcaccccgacaccctttttcggaataggtgacgtgtggcaacgatataacgcgaaacaaccccaaacatgagttttggacctaaagtagaggattgggaatgttcgttgcgaaaaacgaagaattggttccggtagcaaaaactcgtgctttgtatgcaccccgacacccgttttgggaatgggagacgtacggcaacgaaattgcgcgaaaccaccccaaacatgagttttggacctaaagtagtggattgggcatgttcgttgcgg

SEQ ID NO: 739 - DNA, 8036 bp, Zea mays
  VARIATION (7617)..(7711): /replace="c" or "g" or "t"
  misc_feature (7617)..(7711): /note="Nucleotides given in the sequence have no preference with respect to those in the annotations for said positions"
  source: /note="Zea mays BAC clone full insert sequence contig bacm2.pk174.e4.fis11"
tgggataatgattcacatgtactaagacaacaactagtaaatgaacatgttacatctattattgaaccaaacattttggctaaaaaggaacatgtaatttgtattgcaaacgaaactgaagaaataaatttgctctcttctttaaatacttggggctatattgaatttgatgatctttttgagctcggtaatttggaaaatattttatttgctagatcaactataccatgtccttctcatgatatattttatattgctggcaagtacaacaacataggacaatttcttgtgcatagaatttctatttcatctagatatgttgtttcttcactttgtgcaaataagatattggtatgttctcaagaagaaaagaatctcttgtttccatgtactttagttgaagtttcaggtttatatttgaaagacattaataaaagcttagtcatcaacatcaatcatgatgcaaaaccgaggacggtttgctatcaagaaggggagaatgatgagaacataacccgcacagatatgaccatgttaatggctcctgctacaaagacattgaggaacaaagaagttgattggggatcaagtaatgatatttccaacatattaacaaagcaaacacatcatcaacgagcatgcccaatccacaactttaggtccaaaactcatgtttggggtggtttcgcgcaatttcattgctgcacgtcacccattccgaaaacgggtgatgaggacatcactgtcatcaatacaccacaccagcgacctccttcaccaataatcatggaccagtgaaacgagtccgtgcacgtaaatttaattatcaggtgaactcgttccttgttgttgaagctaatcattccttaaatgaggtactgataccttgtgattactttattattctaaggtgtttgggaggtgaaccatctagaatttgagaaggcaacaaggcaataaaagctgctccacttgaggggatttcgaaactacaacaagtgcaagtttaagagggcatatctttcagctcccaaggttgtttaatgcaaataagcacttgttggaaaggtctcttcatctactttctagtggatcaagaatcaacgagagatcagacactaagcgtccagaaactgccgagtgaactcctgctctacccaagtcaatttcgtaactgcagcatgcaccaaattaaatggagcataactttccactcccaaggttgtttagtgcaaataactactgatgaggacatcactatcattgatacaaccataccagtgaccacttcaccattcgtagctaatcaaggaccaatgacacgagcccgtgcacgtaaacttaattatcaggtgaactcgttctttgctattgaagctaattcttctttaaatgaggtactaaagccttgcgatgactttattatgctcaggtgtttgggaggtgaaccgtcttggactggagaaggcaacaaggcaataaaggctgctgcacccgagaggatttcgtaacagcaccaagtacaagtttaaatggggcatatcttccaacttccaaggccgtttaatgcaaataaatacttgttggaaagctcccttcgtctacttgctggtggatcaagaattaatgggagactacacccgaggcgtccagaaactgccgagggaacttcatgactccaccagaattccttcttcctatttctctatttaagcaactagcagccaccaaagaacttgggttttgtttgatgtaagtttagcctttgctacttccttgtaaacgcgtgtgtcggctagaccacccggatacttgaaacagaaccccaactctatcagatccgtgagcgtctgcgttttatcttgttcttgcttgttctcgattgcttgcaggttcaaggctgttcttggcacggcaagagcagcaacaacaggagccggtgtaactatcgctaaggcgcaacacccttgtggttgttgtagtcggatagcacaacgtcgacctccaccccaaatcgtagttatcaggagacggtgtacctgtcgctcaaggcgccacaccatcttggttgtggtagtcgggcagccaacgtcgttctccaacaagttttccacctctatcatctctcatcgaaagatcgggcacccttctacccgttgggtttatcaactacttgttggaaagctctcttcgtctactttcatgtgcatcaagaatcaatgacagaacccaaacgaggcatccagaaactgccgagagagtttcgttctccattagaactcctttctattcctctatttaagcaactagcagccaccaaagaacttgggtttttgtttgatgtaagtttagcctttgctacttccttgtaaacgcgtgtgtcggctagaccacccggatacttgaaacagaaccccaactctatcagatccgtgagcgtctgctttttatcttgttcttgcttgttctcgattgcttgcaggttcaaagttgttcttggcacggcaagagcagcaacaacaggagccggtgtaactatcgctaaggcgcagcacccttgtggttgttgtagtcggatagcacaacgtcgacctccaccccaaatcgtagttaccaggagacggtgtacctgtcgctcaaggcgccacaccatcttggttgtggtagtcgggcagccaacgtcgttctccaacaagttttccaccaccatcatctctcatcgaaagatcgggcacccttctacccgttgggtttatcaacgggtgagcattagtttttgccatcgaaactatttcttcgtttttcgcaacgaacatgtccaatccactactttaggtccaaaactcatgtttggggtggtttctcgcaatttcgttgccatacgtctgtctcttatacacatctcaaccctgaagctcttgttggctagtgcgtagtcgttggcaagctctagaggatccccacggcttcccgtgggacgtgtagcagcacgcaagcacttctcaatgcagcaggcacaggatgcccgcacgaacgatgggacacgggcgccgggagtcggctgcacggcagcgggggtcctccaagcagtcacgggtccaagacaactcatgcgccagcgtagccgctacggtcgagccatccaaagcatccctccgcgctgggcgcggcgggtctacttgcgaggacggcgaccgaaggtccaccgagcacgggagaaatggaaaacgcatcgagcaacgggccatcccacagtgcagccactcgtccagggcgtctggccggcgctagccagccatagccggtcgtggctgcgtcacggccgaaccatggccggccaggcagccaacagcgccagctggagctgggcgcggtagggtgctgaccggccacggctaggccgcgagggggtgcggggctcggccgaggagacctggaggagacgctggaaacgctatggtttcagcagcgttccgcccgggtttcggctgcacgagttccctaccccctactatacctgaggggcataccccctcccaggacttcggggagttcagccttcagaaaaccagggtattttccctggacgccacgaaacccatctaagatggccggacacaacgtttttgctcagaatcaggggtttcgctagcgtgacccgttttccctcacgggtcgacccgaacttcgatgtctcacgcggggggaccacgggagggtcccgtgcccttccacgtgcccgtttttgcggccgtggccgaaaatccgtttttggcccgtgcgccatggcgaacccctcgttttcagcccaaacgcaaggccgaacagccctgccacccgtggcagcgcgcctccgagccgttttccctccgttccaccgtgcccttcactcaagacatgcactttaggttcggtgtctttccacatgcttggacttagcttattttcggggtcgtgcccgagcctcagttttcggcccgtgcgccatggcgaacccctcgttttcagcccaaacgcaaggccgaacagccctgccgcctgtggcagcgcgcctcctcccgttttccctccgttccaccttgcccttcactcaagacatgcactttaggttcggtgtctttccacatgcttggacttagcccgtttttgcggccgtggccgaacctcagttatcagcccgcgcgccatggcgaacacctcgttttcagcccaaacgcaaggccgaacagccctgccgcccgtggcagcgcgcctcctcccgttttccctccgttccaccttgcccttcactcaagacatgcactttaggttcggtgtctttccacacgcttggacttagcccgttttcgcggccgtggccgaacctcagttttcagcccgcgcgccatggcgaacacctcgttttcagcccaaacgcaaggccgaacagccctgccgcccgtggcagcgcgcctcctcccgttttccctccgttccaccttgcccttcactcaagacatgcactttaggttcggtgtctttccacacgcttggacttagcccgttttcgcggccgtggccgaacctcagttttcagcccgcgcgccatggcgaacacctcgttttcagcccaaacgcaaggccgaacagccctgccgcccgtggcagcgcgcctcctcccgttttccctccgttccaccttgcccttcactcaagacatgcactttaggttcggtgtctttccacatgcttggacttagcttattttcggggtcgtgcccgagcctcagttttcggcccgcgcgccatggcgaacacctcgttttcagcccaaacgcaaggccgaacagccctgccgcccgtggcagcgcgcctcctcccgttttccctccgttccaccgtgcccttcactcaagacatgcactttaggttcggtgtctttccacatgcttggacttagcttattttcggggtcgtgccctagcctcagttttcggcccgtgcgccatggcgaacccctcgttttcagcccaaacgcaaggccgaacagccctgccgcccgtcgccacgcgcctgctcccgttttccctccgttccaccttgcccttcacttaagacatgcactttaggttcggtgtctttccacaagcttggacttagctaattttggaggtcgtgcccgagcctccgatttcggcccgtgcgccatggcgaacccctcgttttcagcccatacgcaaggccgaacagccctaccgcccgttgccgcgtgcctccgtgtcgttttccctccgttccaccgtgcccttcaccaaagacatccactttaggttcggtgtgtttccacatgcttggacttagtttattttcgggttcgtgccacagccaccatttccggcccgcgcgccatggcgaaccacctgtttttagcccagacgcattgccgaacagccctgccgcccgtcgccgcgggcctccgtgtcgttttccctccgttccatcttgcccttcacccaagacatacacattagcttcggtgtctttccacacgcttggacttagcttatttccgaggccgtgccccagccgctgttttcggcccacgcgccatggcgaaaccctcgttttcagcccaaacgcaaggccgaacagccatgccgcccgtcgccgcgcgcctccgtgtcgttttccctccgttccaccgtgcccttcacccaagacatacacattagcttcggtgtctttccacacgcttggacttagcttatttccgaggccgtgccccagccgccgttttcggcccgcgcgccatggcgaaaccctcgttttcagcccaaacgcaaggccgaacagccatgccgcccgtcgccgcgcacctcctcccgttttccctccgttccaccttgaccttcactccagacatgcactttaggttcggtgtctttccaaacgctgggacttagcccgttttcggaccgtggccgaaccgttgttttcggaccacgcgccatggcgaacacctcgttttcagcccaaacacaaggacgaacatccctgccgcccgtcgccgtgcgcctccgtgccggagcctcagttcgtcgcgtgcctccgtgtcgttttccctccgttccactgtgcccttcaccaaagacatacactttaggttccgtgtctttccacacgcttggacttagcttattttcgagttcgtgcctgagcctcagttttcggcccgtgcgccatggcgaacacctcgttttcagccaggacgcaaggccgaacagccatgccgcccgtcgtcgcgtgcctccgtgtcgttttccctccgttccaccgtgcccttcactcaagacatacaaacaccttagcttcggtgtctttccattccacacgcttggacttagcttattttcgaggtcatgcccgagcctcagttttcggcccgtgcgccatggcgaacccctcgttttcagcccagacgcaaggccgaacagccctgccgcccgtcgccgcgcgcctccgtgccgttttccctctgttcctccgtgcccttcacccaagacatacatattagcttcggtgcctttccacacgcttggacttagcttattttcggggtcgtgcctgaacctcatttttcggcccgtgcgccatggcgaacccatcgttttcggcccaaacgcaaggccgaacagccatgccgcccgtcgtcgcgcgcctccgtgtcgttttccctccgttccaccgtgcccttcactcaagacatacatacaccttagcttcggtgtctttccattccacacgcttggacttagcctattttcgaggtcgtgccccggtcgccgtttgcggcccgcgcgccatggcgaacccctcgttttcagcctagacgcgtggccgaacagccctgccgcccatcgccaacgttccatcgtgcccttcacccaaggcatacgtaggagcttcggtttctttccacacgctgggacttagcttttcttgtggtcgtgcacgaactcacggcggttttcggcctcttgccacgctgcgccttggacgtttccgttcggaagatcggtgcccctctcccgtgggttcgaaacctagtcgctgggcgctgtgtagagtggggggagggacgaatccgtgcgacgcggggctggatctcagtggatcatggcagcaaggccactctgccacttacaatgccccgtcgcgttttaagtcgtctgcaaaggattcagcacgccgcccgttgggaagggagcttcgaggcggcccgccgcggcgcgtcgaccgggcgggctgagccaatggcacgggcccttggggcgcgaacgccctaacgtgggtcggggcgggcggcgagcagaggcgccggttgctagcttggattctgacttagaggcgttcagtcataatccggcacacggtagcttcgcgccactggcttttcaaccaagcgcgatgaccaattgtgtgaatcaacggttcctctcgtggagcttcggtccgggtcacctttgtccaccaagatggaactgcggccggccgctcattaattaagtcaggcgcgcctctagttgaagacacgttcatgtcttcatcgtaagaagacactcagtagtcttcggccaaaaaaaaaaaaaaaaaaaaaaaaaaaaaaaaaaaaaaaaaaaaaaaaaaaaaaaaaaaaaaaaaaaaaaaaaaaaaaaaaaaaaaaaaaaaaaaacagatcagcttgcatgcctgcagtgcagcgtgacccggtcgtgcccctctctagagataatgagcattgcatgtctaagttataaaaaattaccacatattttttttgtcacacttgtttgaagtgcagtttatctatctttatacatatatttaaactttactctacgaataatataatctatagtactacaataatatcagtgttttagagaatcatataaatgaacagttagacatggtctaaaggacaattgagtattttgacaacaggactctacagttttatctttttagtgtgcatgtgttctcctttttttttgcaa

SEQ ID NO: 740 - DNA, 7907 bp, Zea mays
  source: /note="Zea mays BAC clone full insert sequence contig bacm2.pk174.e4.fis12"
gcaaaataagttttgtctttaacaaaacaggggcggtttgggccccgctacctggtgttttgaggtgtgtacccaacacaaaaagagttggtacacacctctcttagccttgtttgtgcgcagatgttgtgagcgcggtgatgctcggtacaatactcgacacaaggcttcggcaggaaagaactgccagtgttgggcactgccctcgcttgttcgttgggggcattggggggaaataatttgggggaaccaccccattccctagaatttggacggggagggatagtatttttgtggttgttgaaagaaggagaaaatttccactggcaaaaacttctgattttacccacccgacacccggttttggaatggttgacatgtgacaaagaaattgtgggaaaccaccccaaaccagtgttttgtacccgaaatggtgggtttggcattttttttgggaaaaatgaagaaaaggttctgggggcaaaaaattgtggttggtatgcacctcgacacccgtttttggaatgggtgacgtgggacaatgtaattgcgtgaaaccaccccaaacatgacttttggacctaaagtagtggattgggcatgtttgttgcgaaaaacgaagaaatggttccggtggcaaaaaatcgtgttttgtatgcacccgacacccgttttcggaatgggtgacgtgcgacaacgaaattgcgtgaaaccaccccaaacatgagttttggacctaaagtagtggattgggcatgttcgttgcaaaaaacgaagaaatggttccggtggcaaaaactcgtgctttgtatgcacccgacacccgttttcggaatgggtgacgtgcgacaacgaaattgcgcgaaaccaccccaaacatgagttttggacctaaagtagtggattaggcatgttcgttacgaagaacgaaatttcagattttttggacacccgagcgaaaagttatgcccgttttacggaaaacgaccggaatgaaacaaccgtatcctttctccttcgttttctttttttttgtttctgtttttttttggacacccgagcgaaaagttatgcccgttttacggaaaacgaccggaatgaaatgatgtagctgaggtgcccgatctttcggcgagtagagataattccgatttggcggaagttgacccttgcgatccgactacgacgagcaagcccgaggcgccaatgcaatcgctgaaccaactccctgtggttaccgaccttggtgatgcgagatcggcctgatcacgaagatcgtttcctgtgcgcaatcgaagaacgaacaagaaaaagatgcgagcaatctaatctattactcgagggtggagttctgaatacacgaagacagcgcagatttgcgcgtgttcgagagtagctaaagctaatgtaaaacaaaactcggaaataaaggaggcgcagctcctgaataaatagagagggggcgcagcccctaggggcggccaaccctaggtcgtccattatgggccgcaattgggctggtcgtctattcttccgggccttcgttctttaacaacatgatgtagttcaattctcttgcacgggcccgagtcactggcccaggtggaaggggtggcgcctgggctggagaaggtgctgctggtgtagatgtgctcgtgttggtgttgatgtccgcatcatcctccccttcttgaactgaagtcgtcctcgacggcaactcctcatcttctcccgcatacggtttcaaatctgcaacattaaaactagtggaaacaccaaactccgcaggtaggtcgagggtataagcattatcattaatcttggttagtatcttaaaaggaccagcagcacgaggcatcaatttagaacggcgcaaagtaggaaaacgatcctttctcaaatgcaaccaaaccatatcaccaggttcaaaagtaacatgttttcttcctttactaccagcaacctgattttttgtattagtagcagcaatgttctgtttcgtttgttcatgtatggtaatcatttgttcaacatgtgcagaagcatctacatgtggggcgttcgcagcattaagtgaaatcaaatcaataggtgccctaggaatgtaaccataaacaatctggaaagggcacatctttgtagaagaatgcgtggcatgattgtaagcaaattcaacatgaggcaagcaatcctcccaacgtctcaaattcttgtctaaaacagccctaagcatggtagataaagttctatttactacctcagtttgtccatcagtctgagggtgacaagtagtgctaaacaataatttagttcccaatttattccaaagagatctccaaaaatggcttagaaacttagcatcgcgatcagagactattgtttttggaataccatgtaaacgaataatttctctaaagaacaattcagcaacaatgctagcatcatcagttttatgacaaggtataaaatgagccattttagagaatctatcaacaaccacaaaaatactatccctccccttcttagttctaggcaagcccaaaacaaagtccatagagatatcaagccaaggagaagaagggacatgcaaaggcatatacaaaccatggttgttcaaccgtgacttagctttctgacaagtagtgcagcgtgcaacaaggcgctccacatcagcgcgcatccgaggccaaaagaagtgggcagccaacacctcatgtgtcttgtagacgccaaaatgccccatgagaccgcctccatgcgcttcctgtaacaacaaaagacgaaccgagctagctggaacacacagcttgttagcgcgaaacaggaacccatcctgtatgtgaaatttgccccatggtttcccattaatacaatggccgaaagcatctttaaaatcagcatcgtcaacatattgatccttcacagtgtccaaaccaaagattttaaaatctaactgtgacagcatggtatagcgacgagacaaagcatcagcaataacattgtccttcccgttcttgtgtttaataatgtaaggaaaggactcaatgaattctacccatttagcatgacgacggttcagatttgtttgggtacgaatatgttttaaagcctcatgatcagaatggattatgaactcacgatgccaaagatagtgctgccatgtatgcaaagtgcgcactaaagcgtaaagctccttatcataagtagaatatttcagactagcaccgcttaatttttcactaaaataagcaactggttttccttcttgtaacaaaacagcacctagcccaataccgctagcatcgcattcaagctcgaaaactttattaaaatcaggcaattgcaagaggggagctttggttaacttatctttcaaagtgctgaacgctacctcctgcgaatcactccaggcaaacggcacatctttctttgtaagctcatgtagaggcgctgcaatggagctaaaatcacgaacaaatctgcggtagaaaccggcaagtccaagaaagctccgaatttgtgtgaccgtcgtcggtgtaggccactcccgaatggcagcaatcttgctgctatccacctcaatgccctgcggagtaaccacataaccaagaaacgagacacgttgcgtgcaaaatgtgcacttttccatgttaccaaacaagcgagcagcacgcaaagcgtcaaaaacagcacgcaaatgttctaaatgctcctctatagacttgctgtaaataaggatatcatcgaaataaacaacaacaaacaaacctatgaaggcccgtagaacttcgttcattaaacgcataaaggtgctgggagcattagtcaatccaaatggcataaccaaccattcatataaaccaaatttcgttttaaaagccgttttccattcatcaccgagtttcattctaatctgatggtaaccgctacgcaaatcaaccttagagaaaataacggcaccactaagctcatctagcatatcatcaaggcgtggaataggatatcgataacgaactgtgatgttattaatagcacgacaatctacgcacatacgccatgacccatctttctttggaacgagtaaaacgggaaccgagcaagggctaagagactcacgaatgtaacccttatcaagcagcgtctgcacctggcgctggatctccttcgtctcatctggatttgtacggtacggagcgcggttcggaagagaagcgccggggatgagatcgatctgatgctcaatgccacggaggggaggaagacccggtggtaagtccgtaggataaacatcagcatactcctgcaaaaggttaacaacagcagggggtatatccaaagacggtgcatcatcaagcggaacaagcattcgcgagcatacaagtgcataacagggcatatgagcttcatggagatcatcaaaatcagcacgtgtagcaagtaaaacaggagagtgcaacttgatttcagatttaataggtgcggctgatgtcgatttgacttgttgtgcagttttagcagccctagtaagatcatctttcaaaatttggtcaggggtcattggatgtataattattttctggcctttaaacatgaaagaataatgatttgaacgaccatgatgtaaactatcagtatcatattgccaaggtcgacctaataacaaagagcatgcttccataggaataacatcgcaatcagcataatcagaataagaacccagcgaaaaggggacacgtaccgaacgtgttacctttattttaccaccatcattaagccattgaatgtgatacggatgtggatgtgtgcgagtgggcaaggataatttctctaccaacgctgtacttgccaaattgttgcagctgccactatcgatgatgatgcgaatcgaccgttcttgcacgacgcccttggtatggaatagagtgtgtcgctgatttttttcggcctgggcaacctgtgtgctgagaacacgctgcacaacaagactctcatacctatcggcgtcgataggatcaacgtggacttcctcattttctgcatggttagtggcaatcatagcatgactagtttcctcagaatcactggctgaagagtactcaccattgtcacgtataagcaaggtacgcttgtttgggcagtcccgaatcatatgcccaaaccctctacaacgatggcactgaatatcccgtgtacgtcctgtggaagaagcggcgcctttggcagggggcgccactggcttggtcgtccctgtgcgcgatgtagtgctaggcgtagaaggtgcagggctggaaggagttgagctgtgtgttggaccccggcctgcaagagagttagtatatgtctttgatcgtcgtccctgcacttcacgttcagctttgcaagcatattcaaacaatgtggttatatcaaaataatccttataatcaagtatatcctgaatttccctgttcaaaccaccacgaaaacgcgccatagcagcgtcatccgactcaactaaaccacaacgaagcatacccttttgtaactcctggtaataatcctcaacagactgtgaaccttgttgaaaacgctgcattttgttaagcaaatcacgagcataataggaaggaacaaatctgtggcgcatggcagtttttaattgggtccaagtaatgacactgttaatgggaagtttttgtttatactcacgccaccaaattaaagcaaaatcagtaaattcactaatggcagccttcacttggctattagcaggaatatcatggcatgaaaatttctgttctacctctaattcccaatcaagatatgcagcaggatcatatttaccattaaaagatggaattttaaatttaatcttagaaaataagtcattagggggatgacgaaccacacgacgtgcacgaccacgacgatctccatcgtcctgctcagtgtcaccgccatattcctgctccatctttgtggtcagtgcatcaaggcgtgccaggatggtgtcgagtgtggtgcgagtcgccgtttgagcaaggtcaagttggttgaaacgctcggtcgtcgaagtgatcgttgaatcaagccgttcatgcatggtcctaatgtcagcagcaagtccatcaacttgtccccttacttcctgcaactgggcatccaccatgtcgtgtgctcctgccatagttagcgcaaacaccaaaaggagaaaaaccaacgacaaaaacaggggtgtactgctcacaaggcgctcacactagtgctgttatcaagttcttatccgttcttaccaagccacagtggtgaactgcaaccaacaggtggaaccggtgaaagattggatgagcgattgcgtggagaaacagaaacctgctcgtcgtagaaatatgtggagttgtgggtaggctgcactcaagtcaaggattagcacgatcaaacaataatgcaaagttgaattatagtgcaaaacacgaaactatattgctggccacaggtgcaaaggatggatggaactagcagaatggcagtaacgtaaatattgtactagtgatgccaaaaaggcactagtagaaatcacaggtgattttgtttttcttttttttatgatttttttgatatttttctcagcacaagaagcaacaagataggagctacacgaagtttcacctaaaacagatatcagatgtggtctacagaaaatcaggaagttctctgaaaagcgtgcgagaactttgacgaatttttttctttattttcctgaatttttttgacaattttgtcgaaccccaaacagaccgtaggtgagtttggccgggctcagaatggtgtcaactagctcctgtaaaaatttcagattttttggacacccgagcgaaaagttatgcccggtttaaggaaggtatctcaagttatgttttcaaacgaccgggatgaaacaaccgtatcctttctccttcgttgtttttttgtttctgttttttttacgtaaccgaaggagaaaaacaaggaaacgatgttgactcggtttgtttttttttctgtttttttttttgtaaccgaaggagaaaatcaaggaaacggccgttgactcggtttgttttttctgttttgttttttacgtaaccgaaggagaaaaacaaggaaacaatgttgactcggtttgtggcgtgatcaaacgggagatggtggcggcgctatggtttgaatggaggaagaacacaatgtaaccagcaacaaatgacgcgaaagcacacaaattcaacaatgcagattattgaaagaaagtgcgaggctcaaaagggtgctgggataagatctaacctgaatttttatgtggttttgtggactgtaggaaaaaaaaacgctcgataaactcaccgatcaacctggaaatctgataccaattgatgtagctgaggtgcccgatctttcgacgagtagagataattccgatttggcggaagatgacccttgcgatccgactacgacgagcaagcccgaggcgccaatgcaatcgctgaaccaactccctgtggttaccgaccttgctgatgcgagatcggcctgatcacgaagatcgtttcctgtgcgcaatcgaagaacgaacaagaaaaagaggcgagcaatctaatctattactcgagggtggagttctgaatacacgaaaacagcgcagatttgcgcgtgttcgagagtagctaaggctaacgtaaaacaaaactcaggaaataaaggaggcacagctcctgaataaatagagagggggcgcagcccctaggggcggccaaccctatgtcgtccattatgggccgcaattgggctggtcgtctattcttccgggccttcgttctttaacaacatgatgtagttcaattctcttgcacgggcccgagtcactggcccaatggaaggggtggcgcctgggc

SEQ ID NO: 741 - DNA, 9903 bp, Zea mays
  source: /note="Zea mays BAC clone full insert sequence contig bacm2.pk174.e4.fis13"
attgagtcctttccttacattattaaacacaagaacgggaaggacaatgttattgctgatgctttgtctcgtcgctataccatgctgtcacagttagattttaaaatctttggtttggacactgtgaaggatcaatatgttgacgatgctgattttaaagatgctttcggccattgtattaatgggaaaccatggggcaaatttcacatacaggatgggttcttgtttcgcgctaacaagctgtgtgttccagctagctcggttcgtcttttgttgttacaggaagcgcatggaggcggtctcatggggcattttggcgtctacaagacacatgaggtgttggctgcccacttcttttggcctcggatgcgcgctgatgtggagcgccttgttgcacgctgcactacttgtcagaaagctaagtcacggttgaacaaccatggtttgtatatgcctttgcctgtcccttcttctccttggcttgatatctctatggactttgttttgggcttgcctagaactaagaaggggagggatagtatttttgtggttgttgatagattctctaaaatggctcactttataccttgtcataaaactgatgatgctagcattgttgctgaattgttctttagagaaattattcgtttacatggtattccaaaaacaatagtctctgatcgcgatgctaagtttctaagccatttttggagatctctttggaataaattgggaactaaattgttgtttagcactacttgtcaccctcagactgatggacaaactgaggtagtaaatagaactttatctaccatgcttagggctgttttagacaagaatttgagacgttgggaggattgcttgcctcatgttgaatttgcttacaatcatgccacgcattcttctacaaagatgtgccctttccagattgtttatggttacattcctagggcacctattgatttgatttcacttaatgctgcgaacgccccacatgtagatgcttctgcacatgttgaacaaatgattaccatacatgaacaaacgaaacagaacattgctgctactaatacaaaaaatcaggttgctggtagtaaaggaagaaaacatgttacttttgaacctggtgatatggtttggttgcatttgagaaaggattgttttcctactttgcgctgttctaaattgatgccttgtgctgctggtccttttaagatactaaccaagattaatgataatgcttataccctcgacctacctgcggagtttggtgtttccactagttttaatgttgcagatttgaaaccgtatgcgggagaagatgaggagttgccgtcgaggacgacttcagttcaagaaggggaggatgatgcggacatcaacaccaacacgagcacatctacaccagcagcaccttctccagcccaggcgccaccccttccacctgggccagtgactcgggcccgtgcaagagaattgaactacatcatgttgttaaagaacgaaggcccggaagaatagacgaccagcccaattgcggcccataatggacgacctagggttggccgcccctaggggctgcgccccctctctatttattcaggagctgcgcctcctttatttcctgagttttgttttacgttagccttagctactctcgaacacgcgcaaatctgcgctgtcttcgtgtattcagaactccaccctcgagtaatagattagattgctcgcatcttgttcttgttcgttcttcgattgcgcacaggaaacgatcttcgtgatcaggccgatctcgcatcagcaaggtcggtaaccacagggagttggttcagcgattgcattggcgcctcgggcttgctcgtcgtagtcggatcgcaagggtcatcttccgacaaatcggaattatctctactcgccgaaagatcgggcaccttagcttcatcaattggtatgcccgttttacggaaggtacctcaagttatgttctaaaaacgaccgggatgaagcaactgtatcctttctccttcgttatcttttttttctgttttttttgacgtaaccgaaggagaaaaacaaggaagcggccgttgactcggtatgtttttttttctgtttttttttcgtaaccgaaggagaaaatcaaggaaacggccgttgactcggtttgttttttctgttttttttttcgatgatatccttatttacagcaagtctatagaggagcatttagaacatttgcgtgctgtttttgacgctttgcgtgctgctcgcttgtttggtaacatggaaaaatgcacattttgcacgcaacgtgtctcgtttcttggttatgtggttactccgcagggcattgaggtggatagcagcaagattgctgccattcgggagtggcctacaccgacgacggtcacacaaattcggagctttcttggacttgccggtttctaccgcagatttgttcgtgattttagctccattgcagcgcctctacatgagcttacaaagaaagatgtgccgtttgcttggagtgattcgcaggaggtagcgttcagcactttgaaagataagttaacccaagctcccctcttgcaattgcctgattttaataaagtttttgagcttgaatgcgatgctagcggtattgggctaggtgctgttttgttacaagaaggaaaaccagttgcttattttagtgaaaaattaagcggtgctagtctgaaatattctacttatgataaggagctttacgctttagtgcgcactttgcatacttggcagcattatctttggcatcgtgagttcataattcattctgatcatgaggctttaaaacatattcgtacccaaacaaatctgaaccgtcgtcatgctaaatgggtcgaattcattgagtcctttccttacattattaaacacaagaacgggaaggacaatgttattgctgatgctttgtctcgtcgctataccatgctgtcacagttagattttaaaatctttggtttggacactgtgaaggatcaatatgttgacgatgctgattttaaagatgctttcggccattgtattaatgggaaaccatggggcaaatttcacatacaggatgggttcctgtttcgcgctaacaagctgtgtgttccagctagctcggttcgtcttttgttgttacaggaagcgcatggaggcggtctcatggggcattttggcgtctacaagacacatgaggtgttggctgcccacttcttttggcctcggatgcgcgctgatgtggagcgccttgttgcacgctgcactacttgtcagaaagctaagtcacggttgaacaaccatggtttgtatatgcctttgcctgtcccttcttctccttggcttgatatctctatggactttgttttgggcttgcctagaactaagaaggggagggatagtatttttgtggttgttgatagattctctaaaatggctcattttataccttgtcataaaactgatgatgctagcattgttgctgaattgttctttagagaaattattcgtttacatggtattccaaaaacaatagtctctgatcgcgatgctaagtttctaagccatttttggagatctctttggaataaattgggaactaaattattgtttagcactacttgtcaccctcagactgatggacaaactgaggtagtaaatagaactttatctaccatgcttagggctgttttagacaagaatttgagacgttgggaggattgcttgcctcatgttgaatttgcttacaatcatgccacgcattcttctacaaagatgtgccctttccagattgtttatggttacattcctagggcacctattgatttgatttcacttaatgctgcgaacgccccacatgtagatgcttctgcacatgttgaacaaatgattaccatacatgaacaaacgaaacagaacattgctgctactaatgcaaaaaatcaggttgctggtagtaaaggaagaaaacatgttacttttgaacctggtgatatggtttggttgcatttgagaaaggatcgttttcctactttgcgccgttctaaattgatgcctcgtgctgctggtccttttaaggtactaaccaagattaatgataatgcttatatccttgacctgcctgcggagtttggtgtttccactagttttaatgttgcagatttgaaaccgtatgcgggagaagatgaggagttgccgtcgaggacgacttcagttcaagaaggggaggatgatgcggacatcaacaccaacacgagcacatctacaccagcagcaccttctctaccccaggcgccaccccttccacctgggccagtgactcgggcccgtgcaagagacttgaactacatcacgttgttaaagaacgaaggcccggaagaatagacgaccagcccaattgcggcccataatggacgacctagggttggccgcccctaggggctgcgccccctctctatttattcaggagctgcgcctcctttattctccgagttttgttttacgttagccttagctactctcgaacacgcgcaaatctgcgctgtcttcgtgtattcagaactccaccctcgagtaatagattagattgctcgcctctttttcttgttcgttcttcgattgcgcacaggaaacgatcttcgtgatcaggccgatctcgcatcagcaaggtcggtaaccacagggagttggttcagcgattgcattggcgcctcgggcttgctcgtcgtagtcggatcgcaagggtcatcttccgctaaatcggaattatctctactcgccgaaagatcgggcacctcagctacatcaacgtatggcaacgaaattgcgcgaaaccaccccaaacatgagttttggacctaaagtagtggattgggcatgttcgttgcgaaaaacgaagaaatggttttgatggcaagctcacccgttttcggaatgggtgacgtgcagcaacgaaattgcgcgaaaccaccccaaacatgagttttggacctaaagttgtggatggggcatgctcgttgcaaaaaacgaagaaacggttccggtggcaaaaactcgtgctttgtatgcaccccaagacccatttttcggaatgggggacgtgcggcaacgaaattgcgcgaaaccaccccaaacataagttttggacctaaagtagtggattgggcatgttcattgcgaaaaatgaagaattggttccggtggcaaaaactcgtgctttgtatgcaccccgacacccgttgatgaagacatccacactactgatacatctatgccaatacaagtaccaatttctggtcccattactcgcgctcgtgctcgtcaactcaaccatcaggtgattacactcttgagttcatgtccatcatatttagaccatggagacccgtgcactcttgttttgcttaggaaccagggagaagaccgaaagggaaaggatttgaacatgctggattcggactgcagaagaacaccaacttgtgacggtcaccacggtcagatgcgggcttggattggaatgttcaagcacaacatggaaagcttatcaagtctactttcatatggatccggaattatagtcatatctgttctgaggtcgccgtaatcattgttttcttaccgagacatttcctgccttttctgcccatggtgctgcgtcaccctattttggcccaatgggtcgtgtattaagttaggtccattagagacgcatcctagggttgcagcacgaccccaatacccttgtggtcatcctcccatgtttataaaccccctagccgccaccaagaacagcgggttttgtttagatcaagtttagctctcgctacttgcttgtaagcgcgcgtgctagtcagccgcccgtcttcttgtcttcagaaccccaccatattggagtttgattttgaaacctacatttagatctggtaattcagtacttgttctacttgttcttgctagttcttcgattgcttgcaggacgagtgccctagtggccagggtgtcacgctccacaagatcgtgacagccataggaggtggtgtatcggttgctaaggtgcagcgtcttgggaaggctgtagtcgggtcgtgaacgtcgtcttctcccccaatcgagttattccacaccctctcatcgaaagatcgggcaatcacccaacgggtgcacatcagttggtaatcagagcaaggtttatcggtgagagatttacttttcttcgctgtttttttatctcctatagtccagaaaaagccaaaaaatagtagattagttttaccgcaatcctataaaccattgagcatttactagtactacttagttagggcttgttgagtttttggttgcatcggttgtgtcgagttgctggtcttagtttattcctttagagttttgagttctagcacgttttggtcaccacgagatccaccatcaccataaacatctctggttcgtttttgccaccacggatacatctcatgtccgatttggaagtttaaatacaatctggaaagcttatcttatcttctttccaacggatctgaccttgtctcaaaattcattctgagcgctccgcaatcatcgtagagatttctggactttctatattaacaagatttgttaaatctgatttaaaggggctgttagcaatatctttattgtttgggttgtcatagtgaaaaaaagggtttaggtccctgcaaaaaaaacagaagaagaaaaaaaaagaatagaaagaaaaaaaaggaaaagaagaagaagggggctgaatctctaaatctgttgtttctctttgtgctgtgctagttgttctttttcagtgactacctttgtgcctaggctcacgtctctagcatggtttagcctaggaccagcacagtaccaccgttgaacgattattcagcttgcttttgtaactaacgtggtacttgtgtattccttgcttcagcccacctacaactctacatattttgactacagtttgacaggtcgtgttgctgcggcaccgatacacttattccacggttgcagacttgttggttgttgacccctcctgttgtgcaaggtaagaattggtaagagcttgtgtggcaggttgagagtgagcgccttgcagtagctacatcctaatagttgtagagtttttattccttcacgttttttttcttgttgcctctgttcgtctaaccatggcaggattggaggttgatgatgcttctcgtaatatgccacactctcctcgcaccaagggtatcatacaacactttgtaaggctggtgaagacgcacacggaaggccttgataattacatgcaggtgacgaatgaaaagatggggcaattggaggccacacagatcgacacaaacaccaaacttgcaaatgtggaaatgacagttgctcatattgacaagagccttgtcgcactcttgaggcgatttgatgagatgcatgctaataccaatggtgggcgtgatgagggcgccgaaggtaactgggatgactatgttgctgatactgaacaagatgaccaagaagcacctaatcgccggcgactacgtactaaacgtaggtggttttcgccgacgtgaggtacatggtaatgatgatgcttttagtaaggttaaatttaaaatacctccttttgatggtaaatatgaccctgatgcttacattacttgggagatggcggttgatcaaaagtttgcatgccatgaatttcctgagaatgcgcgggttagagctgctactagtgagtttactgatttttgcttctgtttggtggatagaacatggtaagaagaatcctaataacatgccacaaacttgggatgcgttgaaacgggtcatgcgggctagatttgttccttcttattatgcacgtgatatgttaaacaagttgcaacaattgagacagggtactaaaagtgtagaagaatattatcaggaattacaaatgggtatgctgcgttgtaacatagaggaggctgaggaatctgctatggctagatttttgggcaggttaaatagggaaattcaggacatccttgcttataaagattatgctaatgtaacccgattgtttcatcttgcttgcaaagctaaaagggaagtgcagggacgacgtgctagtgcaaggtctaatgtttctgcaggaaaatctacaccatggcaacagcgcacgactacgtccatgaccgaccgtacaccagcaccaactccctcgccaagtcgaccagcacccccgccttcctccggcgacaaaccacgtgcatcttccacaaattcagcaaccaaatctgcctagaaaccagcaggtagtgcctcttcagtagcctccacgggtagaacaagagatgttctgtgttatcgatgcaagggctatggacacgtgcagcgtggttgtcctaatcagcgtgttttggtggtaaaagacgatggtgggtattcctctgctagtgatttggatgaagctacacttgctttgcttgcggctgatgatgcaggcactaaggaaccacccgaagaacagattggtgcagatgatgcagagcattatgagagcctcattgtacagcgtgtgcttagtgcacaaatggagaaggcagagcagaatcagcgacatacgttgtttcaaacaaagtgtgtcattaaggagcgttcatgtcgtttgatcattgatggaggtagctgcaaccacttggctagcagcgacatggtggagaagcttgcacttacgaccaaaccgcacccgcatccatatcatattcaatggcttaacaatagtggtaaggtcaaggtaaccaagctggtacgaattaatttagctattggttcatatcgtgatgttgttgactgtgatgttgtgcctatggatgcttgtaatattctgctaggtagaccatggcaatttgattcagattgtatgcatcatggtagatcaaatcaatattctctcatacaccatgataagaaaattattttgcttcccatgtcccctgaggctattgtgcgtgatgatgttgctaaagctaccaaagctaaaactgagaacaacaagaatattaaagctgttggtaataacaaagatggggtaaaattgaaaggacattgcttgcttgcgacaaaaactgatgttaatgaattatttgcttccactactgttgcctacgccttggtatgcaaggatgctttgatttcaattcaagatatgcagcattctttgtctcctgttattactaacattttgcaggagtattctgatgtatttccaagtgagataccggaggggctgccacctatacgagggattgagcaccaaattgatcttattcctggtgcatctttgccgaatcgtgcgccatataggacaaatccagaggaaacaaaagaaattcagcgacaagtgcaagaactactcgacaaaggttacgtgcgtgagtctcttagtccgtgtgctgttccggttattttagtgcctaaaaagacggaacatggcgtatgtgtgttgattgtagggctattaataatatcacgatacggtatcgacaccctattccacgtttagatgatatgcttgatgaattgagtggtgccatcgtcttttctaaagttgatttgcatagtgggtatcaccagattcgtatgaaattgggagatgaatggaaaactgctttcaaaactaagttcggattgtatgagtggttagtcatgccttttgggttaactaatgcacctagcactttcatgagattaatggacgaagttttgcgtgccttcattggaaaatttgtggtagtatactttgatgacatattgatctacagcaaatctatggatgaacatgttgatcacatgcgtgctgtttttaatgctttacgagatgcacgt

SEQ ID NO: 742 - DNA, 11695 bp, Zea mays
  VARIATION (7820)..(7848): /replace="c" or "g" or "t"
  misc_feature (7820)..(7848): /note="Nucleotides given in the sequence have no preference with respect to those in the annotations for said positions"
  source: /note="Zea mays BAC clone full insert sequence contig bacm2.pk174.e4.fis14"
acttaagaagggcttccttctgaagttgcaaagagaatgacattcgaagagcagttaacaagacaaacttgagtataaagaaagagtagcaccaatacaccttccagcaccctccaagggactctacctaaaatctcgggacgagattcctttaaggggggagggctgtaacaccccaggtgttgccatggctggagcacactttggcactcgagactatgatcacatgtggaagaacttaaggagcaaaagtataaggggctttggaaactaagtttttaccaagagttgggaatgaccaaaggcattaccctaattgtgtgcaactatcaccttgggagagggggaaagaaccctaggcctctcttaaaccctatctcccaaaaccatggataagaagggaaagagagtgagcaaatatgcaaaacatgggtaatctttacccaaaccctaagcaacattataaccatcaattaggggagggaaatattacaaaaaggcccctagggaaaccccaattcaaatctccaagtggagagagagctagagctctctaattccctctaagtcccattttagccctaaatcaaagatcaaccgtgttcactttaaaaatggcgccaaaaccacttgggttctataccaaaaatgtgcaataccacttagggcacccactggaaaaagttgagctcgagactcggacgtttgacatgccatggcatggcttttgtcgtgatatgctcagtatgacacacctgttttggcacccgaagatctccctccctaggccgtatctgccccggcgtctcacagttgagtgacagccctaggtgccaggaagaggtctgcgccggacttttgcaaagattcgcacgtttgcgacctctggcgacatttgaacactggaagaaacaaaccgccacgtgttcgacgccgtctgccgcgccagagcacgcccgcgcgcgcgcccgcgccgcgcccaagccaagccagtgccctggtccgcgtccgcgactataaaacgcccaggagccttggccgtacccctccgcacgcgctcaagcctcaccggagctcagttcgccgccgtttgcccatacacgacgtgcccgcggccacccgagcccctgccaccgtagaccggccagcccagccattcccaaccccgtccagcccttggagaagactgtgcacgtctccgtgaagctccccgagcgaggaatcgggctctgcttcaccggagaggccggcccaaggtcaccggacttcaaccgaccgccggcaaccgtggaccgaggtacaccgtgcgcctctcttcgattccttgcacggttagactccttagacctccacgaagctccctatgcccttggattgaactatgccgccgtggataggccggagcacacaccgccgacgagctcgcccgcctgctcacgtggaccgggcgattccggccatccccgacgacgagccgtacctcgacgtgatcgccaaaccctccccgagccaaccctacccttcgccggacctccctcgccgccggtaagccgcgccacccttttctttcccgcggctactgtttcagttgagggagggactgcgggtgagagggagagaaacccagggggttaagtgaaaggtcagagactcaagtgaatagtgccttaagggtagatctgcgaggtttgaattgttttaaacccagggacctcggcgcaaactgtttttccaggaaaacttaattaaaacctaatttaaattcaaacagaaactttaaaaacccataacttctgtttggtttatccaattttggtcaaaccaattttgccagactctaaatcatgtaacctatttaggaaaaatataaaaccccttggtgctgtggaaaacttaaaagttctgatttaatgttaactttggccaaaagctaaataatagcaagaaaaatggttgtattatttaactaaggttagaaaaatttagagaagttattatctacctactgacctagttaaaaatgttaaacacctctgtccactacattagggtagattttaccccttatcccataatatgtttaagattaagaaaaatgggaaaggtgacataaataaggaaccagagggcacccctatttttgttgagatacttattcaatatagttcactggaaaatatatcatactctggtttagtacaaattaagtaggatatcttttattttatttaaacaaggataacttagaaaaaccctacaaaaatgaccccaaggtaaacacacccccacccttgggataactattgttttattagaaagaacctaagaaaaatatgaaatctgctgtttgacatttttcaaataataaggtagtagaaagtgcctttttgacattaaacttgggaaaatcatagctaattaaccaccccttagtttcctgtgatttttagcacaaagacctatcattaccagaggatgccaacaaaaataacctttaggacagagcctacccctaactaggaggtgtagtgtaaagtgccccttattgcctaacttttgttatttttgtctaaggcctaacttttatactttaagcctcaaattcttaaaacaagctaaaatagctagtgacaacccactgtaatttttacagaatttttggaaattattaaaaccctgttgtagttcaaacctaccctagaaaccctaaatggaaattaaggaaagagaaatgaaagatatgaataaaggttgtccctaaaaactttatttgctgtccacaaaaatatatcaaagcaataccaaaccaatctgtgttatcctaaagccaaacctaagcttaaagggtaataagtcaaagtctatgtataccactagaagccccgcacaactaagaaaaccttaagttacttctcgacttagtttcttttgcataatgttattaaatcatgcataatcatgacatacatgttcattgcatttcgatagactgtaatcttgctgacggagagtacatcctcgtgccggagcaaggagctgctcaggaggtagccccagatccagcaccagagcctgcaccagaggacctgcctgccactgctttggaaggcaagccccggttttatgcataacctgttatttatgctattttacttcacttaatgattgtaggattgattgtgcacttaggtgtaggaattgtttgaaaccctagttgcatgatctcaggaatccttttgaaatgaatactagtatgacaggtcgagtagttgctttaattaaataggatctcggtagaagacgagtgatttttctagcactcgcgcgagatcagaaaattgattgtacccactttcacactgtcatgatactagttggtggacaacaatccatggggattggttgtttacgagatggaaaatggaataaggattaacgtgcggatacctgtgtcaagcgtttgaacgtactgagcacatgccgagaaatatggtaaatcggtaagcctagtacctgagtgaacccggcagtggacatatcccctcacgcgtcctgagacgaggtctcccattccggttatggtgggtacaagtgcggtcactgcacgatggccagtcggggtcagtgaggcattgtacgccaaggcggtgagccctgatctgctgacggggaatcgatggggacggttgatgtgtgtggggacggagtgcccctacatgtcgtgtgtttaggtttaccttgcaaggataaaaactcgattcgaatcgtctgcttctcgcagctaatgagactgcttgatccattgtactgcattgagtaataagtggaagtatgatgagttgagataagatgttgactgttaatgatgcttgctaccatgtatgagtagatagtccacttttagccttaagagagtcacacttaactttgattaagttaaaatcttgatttagaaactcagctagtgcttttggcaaccaaaccccacagccaaacagctgcatgtctagaggtagaggagtagactcctcacaccgggtaagtctagttgagtattagtatactcagccttgcttgtggcataatttttacaggttctctggaggagatggttgctgggattacttggccgaccaccctgccaccgggttggactgtcgagtgggaccctgcctcggctgaggaggagcatgaggagtgatgggacaggcttccccatctctctgttttatttaccgttagttttattccgctgcacttcgaacaatgatggatacttttgcaaaaactccgatgatgatgatggcgatgtaataatttaacattatgacatgtatggttttatgctttattgtatttgctctgtgactcaccttcgagtgagattgtggtacttgatcctgtcagtggccgtgtcggactagatccgagggattgacgggttattcccatttaagtgtggtctagcctctaaggcgggacttggacacttaagttggaataattcgggcagttccgccacatgggtgacgtgcgacaacgaaattgcgcgaaaccaccccaaacatgagttttggacctaaagtagtggattgggcatgttcgttacgaagaacgaagaaatggttccggtggcaaaaactcgtgctttgtatgcaccccgacacccgttttcggaatgggtgacatgcggcaacaaaattgcgcgaaaccaccctaaacatgagttttgtacctaaagtagtggattgggcatgttcgttgcgaaaaacgaagaaatggttccggtggcaaaaactcgtgctttgtatgcaccccgacacccgttttcggaatgggtgacgtgcgacaacgaaattgcgcgaaaccaccccaaacatgagttttggacctaaagtagtggattgggcatgttcgttgcgaaaaacgaagaaatggttccggtggcaaaaactcgtgcttttatgcactcgacacccgttttcggaatgggtgacgtgcgacaacgaaattgcgcgaaaccaccccaaacatgagttttgtacctaaagtagtggattgggcatgttcgttgcgaaaaacgaagaaatggttccggtggcaaaaactcgtggttttatgcacccgacactcgttttcggaatgagtgaagtgcggcaacgaaattgcgcgaaccaccccagacatgagttttggacctaaagtagtgcattgggcatgttcgttgcgaaaaacgaagaaatggttccggtggcaaaaactcgtgcttttatgcacccgacacccgttttcggaatgggtgacatgtgacaacgaaattgcgcgaaaccaccccaaacatgagttttgtacctaaagtagtggattgggcatgttcgttgcgaaaaacgaagaaatggttctggtggcaaaaactcgtgcttttgtatgcaccacgacacccgttttcggaatgggtgacgtgcgacaacgaaattgcgcgaaaccaccccaaacatgagttttggacctaaagtagtggattggacatgttcgttgcgaaaaacgaagaaatggttccggtggcaaaaactcgtgctttgtatggactcgacacccgttttcggaatgggtgacgtgcgacaacgaaattgcgcgaaaccaccccaaacatgagttttggacctaaagtagtggattgggcatgttcgttgcaaaaaacgaagaaatggttccggtggcaaaaacttatgctttgtatgcacccgacacccgttttcggaatgggtgacgtgcgacaacgaaattgtgcgaaaccaccacaaacatgagttttggacctaaagtagtggattgggcatgttcgttacgaagaacgaagaaatggttccggtggcaaaaactcgtgctttgtatgcaccccgacacccgttttcggaatgggtgacatgcggcaacaaaattgcgcgaaaccaccctaaacatgagttttgtacctaaagtagtggattgggcatgttcgttgcgaaaaacgaagaaatggttccggtggcaaaaactcgtgctttgtatgcaccccgacacccgttttcggaatgggtgacgtgcgacaacgaaattgcgcgaaaccaccccaaacatgagttttggacctaaagtagtggattgggcatgttcgttgcgaaaaacgaagaaatggttccggtggcaaaaactcgtgcttttatgcactcgacacccgttttcggaatgggtgacgtgcggaaacgaaattgcgcgaaaccaccccaaacatgagttctggacctaaagtagtggattgggcatgttcgttgcgaaaaacgaagaaatggttccggtggcaaaaaatcgtgcttttatgcactcgacacccgttttcggaatggttgacatgtgacaacgaaattgcgcgaaaccaccccaaacatgagtttgtacctaaagtagtggattgggcatgttcgttgcgaaaaacgaagaaatggttccggtggcaaaaactcgtgctttgtatgcacccgacacccgttttcggaatgggtgacgtgcgacaacgaaattatgcgaaaccaccccaaacatgagttttggacctaaagtagtggattgggcatgttcgttacgaaaaacgaagaaatggttccggtggcaaaaactcgtgctttgtatgcaccccgacaaccgttttcagaatgggtaacgtgcggcaacaaaattgtgcgaaaccaccccaaacatgagttttgtacctaaagtagtggattgggcatgttcgttgcgaaaaacgaagaaatggttccggtggcaaaaactcgtactttgtatgcaccccgacacccgttttcggaatgggtgacgtgcgacaacgaaattacgcgaaaccaccccaaacatgagttttgtacctaaagtagtggattgggcatgttcgttgcgaaaaacgaagaaatggttccggtggcaaaaactcgtactttgtatgcacccgacacccgttttcggaatgggtgacgtgcgacaacgaaattgtgcgaaaccacccctaacatgagttttggacctaaagtagtggattgggcatgttcgttacgaaaaacgaagaaatggttccggtggcaaaaactcgtgctttgtgatgaggacatcactatgagtacgactataccagcagcacctccacatcaagcgccacttccttcattagctgggccaatcactcgggcccgtgccagagatcttaacttcgtcgagctactgaagaatgagggcccagaagaatagacgaccagcccaactgcagcccatagtggacgacctagggttggccgccctaggggctgcgccccctctatttatgcaggagctgcgcctcctttattttcgagttttgttttacgttagccttagctactctcgaacacgcgcaaatctgcgctgtcttcgtgtattcagaactccaccctcgagtaatagattagattgctcgcatctttttcttgttcgttcttcgattgcgcacaggaaacgatcttcgtgatcagaccgatctcgcatcagcaaggtcggtaaccacagggagttggttcagcgattgcattggcgcctcgggcttgctcgtcgtagtcggatcgcaagggtcatcttccgccaaatcggaattatctctactcgccgaaagatcgggcacctcagctacatcactttgtatgcaccccgacacccgttttcggaatgggtgacgtgcgacaacgaaattgcgcgaaaccaccccaaacatgagttttggacctaaagtagtggattgggcatgttcgttgcgaaaaaaaaaaaaaaaaaaaaaaaaaaaaaaactcatgctcacccgttttcggaatgggtgacgtgcagtaacgaaattgcgcgaaaccacctcaaacatgagttttggacctaaagttgtggattgggcatgctcgttgcaaaaaacgaagaaacggttccggtggcaaaaactcgtgctttgtatgcaccctgacacccgttttcggaatgggggacgtgcggcaacgaaattgcgcgaaaccaccccaaacataagttttggacctaaagtagtggattgggcatgttcgttgcgaaaaacgaagaattggttccggtggcaaaaactcgtgctttgtatgcaccccgacacccgttttcggaatgggtgacgtgcggcaacgatatagcacgaaaccacccaaacatgagttttggaactaaagtagaggattgggcatgttcattgcgaaaaacgaagaattgcttccggtgtcaaaaactagtgctttatatgcaccccgacacccgttttcggaatgtgtgacgtcccgcaacgaaattgcgcgaaaccaccccaaatatgagtttttacctaaagtagtggattgggcatgttcgttgtgaaaaacgaagaattggttccggtggcgaaaactcgtgctttgtatgcaccccgacacccgttttgggaatgggtgacgtacggcaacgaaattgcgtgaaaccaccccaaacatgagttttggacctaaagtagtggactgggcatgttcgttgtggaaaacgaagatatggttccggtggcgaaaactcatgctttgtatgcacccgacagtcgtttttggaatgggtgacgtgcgacaacgaaattgcgcgaaaccaccccaaacatgagttttggacctaaagtagtggattgggcatgttcgttgcgaaaaacgaagaaatggttcctgtggcaaaaagtcgtgctttgtaccgacacccgttttgggaatgggtgacgtatgatgcggacatcaacaccaacacgagcacatctacaccagcagcaccttctctaccccaggcgccaccccttccaacaccaacacgaggacatcaacaccaacacgaacacacagctcaactccttccagccctgcaccttctacgcctagcactacatcgcgcacagggacgaccaagccagtggcgccccctgccaaaggcgccgcttcttccacaggacgtacacgggatattcagtgccatcgttgcagagggtttggacacatgattcgggactgcccaaacaagcgtaccttgcttatacgtgacaatggtgagtactcttcagctagtgattctgaggaaactagtcatgctatgattgccactaaccatgcagaaaatgaggaagtccacgttgatcccatcgacgccgataggtatgagagtcttgttgtgcagcgtgttctcagcacacaggttgcccaggccgaaaaaaatcagcgacacactctattccataccaagggcgtcgtgcacgaacggtcgattcgcatcatcatcgatagtggcagctgcaacaatttggcaagtacagcgttggtagagaaattatccttgcccactcgcacacatccacatccgtatcacattcaatggcttaatgatggtggtaaaataaaggtaacacgttcggtacgtgtccccttttcgctgggttcttattctgattatgctgattgcgatgttattcctatggaagcatgctctttgttattgggtcgaccttggcaatatgatactgatagtttacatcatggtcgttcaaatcattattctttcatgtttaaaggccagaaaataattatacatccaatgacccctgaccaaattttgaaagatgatcttactagggctactaaaactgcacaacaagtcaaatcgacatcagccgcacctattaaatctgaaatcaagttgcactctcctgttttacttgctactcgtgctgattttgatgatctccatgaagctcatatgccctgttatgcacttgtatgctcgcgcatgcttgttccgcttgatgatgcaccgtctttggatataccccctgctgttgttaaccttttgcaggagtatgctgatgtttttcctacggacttaccaccgggtcttcctcccctccgtggcattgagcatcagatcgatctcatccccggcgcttctcttccgaaccgcgccccgtaccgtacaaatccagaggagacgaaggagatccagcgccaggtgcagacgctgcttgataagggttacattcgtgagtctcttagcccttgctcggttcctgttttactcgttccaaagaaagatgggtcatggcgtatgtgcgtagattgtcgtgctattaataacatcacagttcgttatcgatatcctattccacgccttgatgatatgttagatgagcttagtggtgccgttattttctctaaggttgatttgcgtagcggttaccatcagattagaatgaaactcggtgatgaatggaaaacggcttttaaaacgaaatttggtttatatgaatggttggttatgccatttggattgactaatgctcccagcacctttatgcgtctaatgaacgaagttctacgggccttcataggtttgtttgttgttgtttatttcgatgatatccttatttacagcaagtctatagaggagcatttagaacatttgcgtgctgtttttgatgctttgtgtgctgctcgcttgtttggtaacatggaaaagtgcacattttgcacgcaacgtgtctcgtttcttggttatgtggttactccgcagggcattgagatggatagcagcaagattgctgccattcgggagtggcctacaccgacgacggtcacacaaattcggagctttcttggacttgccggtttctaccgcagatttgttcgtgattttagctccattgcagcgcctctacatgagcttacaaagaaagatgtgccgtttgcttggagtgattcgcaggaggtagcgttcagcactttgaaagataagttaacccaagctcccctcttgcaattgcctgattttaataaagtttttgagcttgaatgcgatgctagcggtattgggctaggtgctgttttgttacaagaaggaaaaccagttgcttattttagtgaaaaattaagcggtgctagtctgaaatattctacttatgataaggagctttacgctttagtgcgcactttgcatacatggcagcactatctttggcatcgtgagttcataattcattctgatcatgaggctttaaaacatattcgtacccaaacaaatctgaaccgtcgtcatgctaaatgggtcgaattcattgagtcctttccttacattattaaacacaagaacgggaaggacaatgttattgctgatgctttgtctcgtcgctataccatgctgtcacaattagattttaaaatctttggtttggacactctgaaggatcaatatgttgacgatgctgattttaaagatgctttcggccattgtattaatgggataccatggggcaaatttcacatacaggatgggttcctgtttcgcgctaacaagctgtgtgttccagctagttcggttcgtcttttgttgttacaggaggcacatggaggcggtctcatggggcattttggcgtctacaaaacacatgaggtgttggctgcccacttcttttggcctcggatgcgcgctgatgttttgagcgccttgttgcacgctgcactacttgtcacaaagctaagtcacggttgaacaaccatggtttgtatatgcctttgcctgtcccttcttctccttggcttgatatctctatggactttgttttgggctt

SEQ ID NO: 743 - DNA, 15230 bp, Zea mays
  source: /note="Zea mays BAC clone full insert sequence contig bacm2.pk174.e4.fis15"
cgtaaagctccttatcataagtagaatatttcagactagcaccgcttaatttttcactaaaataagcaactggttttccttcttgtaacaaaacagcacctagcccaataccgctagcatcgcattcaagctcaaaaactttattaaaatcaggcaattgcaagaggggagcttgggttaacttatctttcaaagtgctgaacgctacctcctgcgaatcactccaagcaaacggcacatctttctttgtaagctcatgtagaggcgctgcaatggagctaaaatcacgaacaaatctgcggtagaaaccggcaagtccaagaaagctccgaatttgtgtgaccgtcgtcggtgtaggccactcccgaatggcagcaatcttgctgctatccacctcaatgccctgcggagtaaccacataaccaagaaacgagacacgttgcgtgcaaaatgtgcatttttccatgttaccaaacaagcgagcagcacgcaaagcgtcaaaaacagcacgcaaatgttctaaatgctcctctatagacttgctgtaaataaggatatcatcgaaataaacaacaacaaacaaacctatgaaggcccgtagaacttcgttcattaaacgcataaaggtgctgggagcattagtcaatccaaatggcataaccaaccattcatataaaccaaatttcgttttaaaagccgttttccattcatcaccgagtttcattctaatctgatggtaaccgctacgcaaatcaaccttagagaaaataacggcaccactaagctcatctagcatatcatcaaggcgtggaataggatatcgataacgaactgtgatgttattaatagcacgacaatctacgcacatacgccatgacccatctttctttggaacgagtaaaacaggaaccgagcaagggctaagagactcacgaatgtaacccttatcaagcaacgtctgcacctggcgctggatctccttcgtctcatctggatttgtacggtacggggcgcggttcggaagagaagcgccggggatgagatcgatctgatgctcaatgccacggaggggaggaagacccggtggtaagtccgtaggataaacatcagcatactcctgcaaaaggttaacaacagcagggggtatatccaaagacggtgcatcatcaagcggaacaagcattcgcgagcatacaagtgcataacagggcatatgagcttcatggagatcatcaaaatcagcacgtgtagcaagtaaaacaggagagtgcaacttgatttcagatttaataggtgcggctgatgtcgatttgacttgttgtgcagttttagcagccctagtaagatcatctttcaaaatttggtcaggggtcattggatgtataattattttctggcctttaaacaagaaagaataatgatttgaacgaccatgatgtaaactatcagtatcatattgccaaggtcgacctaataacaaagagcatgcttccataggaataacatcgcaatcagcataatcagaataagaacccagcgagaaggggacacgtaccgaacgtgttacctttattttaccaccatcattaagccattgaatgtgatacggatgtggatgtgtgcgagtgggcaaagataatttctctaccaacgctgtacttgccaaattgttgcagctgccactatcgatgatgatgcgaatcgaccgttcgtgcacgacgcccttggtatggaatagagtgtgtcgctgatttttttcggcctgggcaacctgtgtgctgagaacacgctgcacaacaagactctcatacctatcggcgtcgatgggatcaacgtggacttcctcattttctgcatggttagtggcaatcatagcatgactagtttcctcagaatcactggctgaagagtactcaccattgtcacgtataagcaaggtacgcttgtttgggcagtcccgaatcatgtgcccaaaccctctgcaacgatggcactgaatatcccgtgtacgtcctgtggaagaagcggcgcctttggcagggggtgccactggcttggccggccctgtgcgcgatgtagtgctaggcgtaggaggtgcagggctggaaggagttgagctgtgtgttggaccccggcctgcaaaagagttagtatatgtctttgatcgtcgtccctgcacttcacgttcagctttgcaagcatattcaaacaatgtggttatatcaaaataatccttataatcaagtatatcctgaatttccctgttcaaaccaccacgaaaacgcgccatagcagcgtcatctgactcaaccaaaccacaacgaagcatacccttttgcaactcctggtaatattcctcaacagattgtgaaccttgttgaaaacgctgcattttgttaagcaaatcacgagcataataggaaggaacaaatctgtggcgcatggcagtttttaattgggtccaagtaatgacactgttaatgggaagtttttgtttatactcacgccaccaaattaaagcaaaatcagtaaattcactaatggcagccttcacttggctattagcaggaatatcatggcatgaaaatttctgttctacctctaattcccaatcaagatatgcagcaggatcatatttaccattaaaagatggaattttaaatttaatcttagaaaataagtcattagggggatgacgaaccacacgacgtgcacgaccacggcgatctccatcgtcctgctcagtgtcaccgccgtattcctgctccatctttgtggtcaatgcatcaaggcgtgcaaggatggtgtcgagtgtggtgcgagtcgccgtttgagcaaggtcaagttggttgaaacgctcggtcgtcgaagtgatcgttgaatcaagccgttcatgcatcgtcctaatgtcagcagcaagtccatcaacttgtccccttacttcctgcaactgggcgtccaccatgtcgtgtgctcctgccatagttagcgcaaacaccaaaagaagaaaaaccaacgacaaaaacaggggtgtactgctcacaaggcgctcacactagtgctgttatcaagttcttatccgttcttaccaagccacagtggtgaactgcaatcaacagatggaaccggtgaaagattggatgagcgattgcgtggagaaacagaaacttgcgtgctgtttttgacgctttgcgtgctgctcgcttgtttggtaacatggaaaaatgcacattttgcacgcaacgtgtctcgtttcttggttatgtggttactccgcagggcattgaggtggatagcagcaagattgctgccattcgggagtggcctacaccgacgacggtcacacaaattcggagctttcttggacttgccggtttctaccgcagatttgttcgtgattttagctccattgcagcgcctctacatgagcttacaaagaaagatgtgccgtttgcttggagtgattcgcaggaggtagcgttcagcactttgaaagataagttaacccaagctcccctcttgcaattgcctgattttaataaagtttttgagcttgaatgcgatgctagcggtattgggctaggtgctgttttgttacaagaaggaaaaccagttgcttattttagtgaaaaattaatcggtgctagtctgaaatattctacttatgataaggagctttacgctttagtgcgcactttgcatacttggcagcattatctttggcatcgtgagttcataattcattctgatcatgaggctttaaaacatattcgtacccaaacaaatctgaaccgtcgtcatgctaaatgggtcgaattcattgagtcctttccttacattattaaacacaagaacgggaaggacaatgttattgctgatgctttgtctcgtcgctataccatgctgtcacagttagattttaaaatctttggtttggacactgtgaaggatcaatatgttgacgatgctgattttaaagatgctttcggccattgtattaatgggaaaccatggggcaaatttcacatacaggatgggttcctgtttcgcgctaacaagctgtgtgttccagctagctcggttcgtcttttgttgttacaggaagcgcatggaggcggtctcatggggcattttggcgtctacaagacacatgaggtgttggctgcccacttcttttggcctcggatgcgcgctgatgtggagcgccttgttgcacgctgcactacttgtcagaaagctaagtcacggttgaccaaccatggtttgtatatgcctttgcctgtcccttcttctccttggcttgatatctctatggactttgttttgggcttgcctagaactaagaaggggagggatagtatttttgtggttgttgatagattctctaaaatggctcattttataccttgtcataaaactgatgatgctagcattgttgctgaattgttctttagagaaattattcgtttacatggtattccaaaaacaatagtctctgatcgcgatgctaagtttctaagccatttttggagatctctttggaataaattgggaactaaattattgtttagcactacttgtcaccctcagactgatggacaaactgaggtagtaaatagaactttatctaccatgcttagggctgttttagacaagaatttgagacgttgggaggattgcttgcctcatgttgaatttgcttacaatcatgccacgcattcttctacaaagatgtgccctttccagattgtttatggttacattcctagggcacctattgatttgatttcacttaatgctgcgaacgccccacatgtagatgcttctgcacatgttgaacaaatgattaccatacatgaacaaacgaaacagaacattgctgctactaatacaaaaaatcaggttgctggtagtaaaggaagaaaacatgttacttttgaacctggtgatatggtttggttgcatttgagaaaggatcgttttcctactttgcgccgttctaaattgatgcctcgtgctgctggtccttttaagatactaaccaagattaatgataatgcttataccctcgacctacctgcggagtttggtgtttccactagttttaatgttgcagatttgaaaccgtatgcgggagaagatgaggagttgccgtcgaggacgacttcagttcaagaaggggaggatgatgcggacatcaacaccaacacgagcacatctacaccagcagcaccttctccagcccaggcgccaccccttccacctgggccagtgactcgggcccgtgcaagagaattgaactacatcatgttgttaaagaacgaaggcccggaagaatagacgaccagcccaattgcggcccataatggacgacctagggttggccgcccctaggggctgcgccccctctctatttattcaggagctgtgcctcctttatttcctgagttttgttttacgttagccttagctactctcgaacacgcgcaaatctgcgctgttttcgtgtattcagaactccaccctcgagtaatagattagattgctcgcctctttttcttgttcgttcttcgattgcgcacaggaaacgatcttcgtgatcaggccgatctcgcatcagcaaggtcggtaaccacagggagttggttcagcgattgcattggcgcctcgggcttgctcgtcgtagtcggatcgcaagggtcatcttccgccaaatcggaattatctctactcgccgaaagatcgggcacctcagctacatcacgagtttttgccaccggaaccatttcttcgtttttcgcaacgaacatacacaatccactactttaggtccaaaactcatgtttggggtggtttcgcgcaatttcgttgccacacgtcacccgttccgaaaacgggtgtcgggtgcatacaaagcacgagttttcgccacccgaaccattttttcgtttttcgcaacgaacatgcccaatccactactttaggtccaaaactcatgtttggggtggtttcgcgcaatttcgttgtcgtacgtcaccctttcccaaaacgggagtttttgccaccggaagcaattcttcttttttcgcaatgaacatgcccaatcctttactttaattccaaaactcatgtttggggtggtttcgatatcgttgccgcacgtcacccattccgaaaacgggtgtcgcggtgcatacaaagcacgagtttttgccagcggaaccatttcttcgttttttgcaacgaacatgcccaatccactactttaggtccaaaactcatgtttggggtggtttcgcgcaatttcgttgccgcacgtcacccattccgaaaacgggtgtcgggtgcatacaaagcatgagttttcgccaccggaaccgtttctttgtttttcgcaacgaacatgcccaatgcactactttaggtccaaaactcatgtttggggttgtttcgcgcaatttcgttgtcgtgcgtcacccattcccaaaacgggtgtcggggtgcatacaaagcacgagtttttgccaccggaatcaattcttcgtttttcgcaacgaacatgcccagtcctctacttcaggtccaaaactcgtgtttggggtggtttcgcgctatatcgttgccgcacgtcacccattccgaaaacgggtttcggggtgcatacaaagcacgagttttcgccaccagaaccatttcttcgtttttcgcaacgaacatgcccaatccactactttaggtccaaaactcatgtttggggtggttttgcgcaatttcgttgccgcacgtcacccatttcgaaaacgggtgtcgggtgcatacaaagcacgagttttcgccaccggaaccatttcttcgtttttcgcaacgaacatgcccaatccactacttttggtccaaaactcatgtttggggtggtttcgcgcaatttcgttgtcgtacgtcacccattcccaaaacgggtgttggggtgcatacaaagcacgagtttttgccaccggaaccaattcttcgtttttcgtaacgaacttgcccaatcctctacttcaggtccaaaactcatgtttggggtggtttcgcgctatatcgttgccgcacgtcacccattccgaaaacgggtgtcggggtgcatacaaagcacgtttttttgccaccggaaccatttcttcgtttttcgtaacgaacatacccaatccactactttagttccaaaactcatgtttggggtggtctcgcgcaatttcgttgccgcacgtcacccgttcggaaaacgggtgtcgggtgcatataggggcggtaatggatcacgatccaaatgcttcttcacaaaaacttaaggccctcaaataatattagttcaaaaatgaataagaataaggcccgatcctaatccgattcgacccttaaaatttacagtgtaaagtttatagcccattaccacccctaggtgcatacaaagcacgagttttcaccaccggaaccatttttcgtttttcgcaatgaacatgcccaatccactactttaggtccaaaactcatgtttggggtggtttcgcgcaatttcgttgtcgtacgtcaccctttcccaaaatgggagtttttgccaccggaagcaattcttcgtttttcgcaatgaacatgcccaatcctctactttagatccaaaactcatgtttggggtggtttcgtgctatatcgttgccgcacgtcacccattccgaaaacgggtgtcggggtgcatacaaagcacgagtttttgccaccggaaccatttcttcgtttttcgcaacgaacatgcccaatcctctactttaggtccaaaactcatgtttggggtggttttgcgcaatttcgttgccgcacgtcacccatttcgaaaacgggtgtcgggtgcatacaaagcacgagttttcgccaccggaaccatttcttcgtttttcgcaacgagcatgcccaatccactactttaggtccaaaactcatgtttggggtggtttcgcgcaattacgttgtcgtacgtcacccattcccaaaacgggtgttggggtgcatacaaagcacgagtttttgccaccggaaccaattcttcgtttttcgtaacgaacatgcccaatcctctacttcaggtccaaaactcatgtttggggtggtttcgcgctatatcgttgccgcacgtcacccattccgaaaacgggtgtcggggtgcatacaaagcacgatttttttgccaccggaaccatttcttcgtttttcgcaacgaacatacccaatccactactttaagtccaaaactcaggtttggggtggtttcgcgcaatttcgttgccgcacgtcacctgttccgaaaacgggtgtcgagtgcatacaaagcatgagttttcgccaccggaaccatttcttcgtttttcgcaacgagcatgcccaatccactactttaggtccaaaactcatgtttggggtggtttcgcgcaatttcgttctcgtacgtcaccctttcccaaaacgggtgtcagggtgcatacaaagcacgagtttttgccaccggaagcaattcttcgtttttcgcaatgaacatgcccaatcctctactttagttccaaaactcatgtttggggtggtttcgcgctatatcgttgccgcacgtcacacattccgaaaacgggtgtcgggggtgcatacaaagcacgagtttttgccaccggaaccatttcttcgtttttcgcaacgaacatgcccaatccactactataggtccaaaactcatgtttggggtggtttcacgcaatttcgttgtcgtacgtcacccattcccaaaacgggtgtcggggtgcatacaaagcacaagtttttgccaccggaaccaattcttcgtttttcgcaacgaacatgcccaatcctctactttaggtccaaaactcatgtttggggtggtttcgcgctatatcgttgccgcacgtcaccctttcggaaaacgggtgttggggtgcacacaaagcacgagtttttgccaccggaacaaattcttcgtttttcgcaacgaacatgcccaatcctctactttaggtccaaaactcatgtttggggtggtttcgcactatatcgttgccgcacatcacccattccgaaaacgggtgtcggggtgcatacaaagcacgagtttttgccaccggaaccatttcttcgtttttcgcaacgaacatgcccaatccactaatttaggtccaaaactcatgtttggggtggtttcgcgcaatttcgttgccgcacgtcacccattccgaaaacaggtgtcggggtgcatacaaagcacgagttttcgccaccggaaccaattcttctttttcggaacgaacatgaccaatgcactactttaggtaaaaactcatgtttggggtgatttcgcgcaatttcgttgccgcacgtcacacattccgaaaacgggtgttggggtgcatacaaagcacgagtttttgccaccggaaccaattcttcgtttttcgcaacgaacatgcccaatccactactttaggtccaaaactcatgttttgggtggtttcgcgctattttgttgccgcacgtcacccattccgaaaacgggtgtcgcgtgcatacaaagcatgagatttcgccaccggaatcatttcttcgtttttcacaacgaacatgcccaatccactaatgtaggtccaaaactgatgtttggggtggtttcgcgcaatttcgttatcgtacgtcacccattcccaaaacgggtgtcggggttgcatacaaagcacgagtttttgccaccggaaccaattctttgtttttcgcaacgaacatgcccaatcctctactttaggtccaaaactcatgtttggggtagtttcgcgctatatcgttgccgcacgtcacccattccgaaaacgggtgtcggggtgcacacaaagcatgagttgccaccggaaccaattcttcgtttttcgcaacgaacatgcccaatcctctactttaggtccaaaactcatgttttgggtggttccgtgctatatcgttgccgcacgccacccattccgaaaacaggtgtcggggtgcatacaaagcacgagcttttgccgccggaaccatttcttcgtttttcataacgaacaagcccaatccactactttaggtccaaaactcatgtttggggtggtttcgcgcaatttcgttgccgcacaacacccattccaaaaacgggtgtcgaggtgcatacaaagcacgattttttgccaccgaaaccaattcttcgtttttcgcaacgaacatgcccaatccactactttaggtaaaaactcatgtttgggtggtttcgcgcaatttcgttgccgcacgtcacacaatccaaaaacgggtgttagggtgcatacaaagcacgagtttttgccaccggaaccaattctttgtttttcgcaacgaacatgctcaatcatctactttaggtccaaaactcatgtttgggtgtggtttcgcgctatatcgttgccgcacgtcacccattccgaaaacgggtgttggggtgcatacaaagcacgagtttttaccaccggaaccaattcttcgtttttcgcaacgaacatgcccaatcctctactttaggtccaaaactcatgtttggggtggtttcgcacaatttcgttgtcactcatcacccattccgaaaacgggtgtcgggtgcatacaaagcacgaatttttgccaccagaaccatttcttcgtttttcgcaacgaacatgcccaatccactactttaggtccaaaactcatgtttggggtggtttcacgcaattttgttgtcgtacgtcacccattaccaaaacgggtgtcggggtgcatacaaagcacaagtttttgccaccggaaccaattcttcgtttttcgcaacgaacatgcccaatcctctactttaggtccaaaactcatgtttggggtggtttcgcgctatatcgttgccgcacgtcacccattacgaaaacgggtttcggggtgcatacaaagcacgagttttcgcaccgaaaccatttcttcgtttttcgcaacgaacatgcccattccactactttaggtccaaaactcatgtttggggtggttttgcgcaatttcgttgccgcacgtcgcccatttcgaaaacgggtgtcgtttgcatacaaagcacgagttttcgccaccggaaccatttcttcgtttttcgcaacgagcatgcccaatccactactttaggtccaaaactcatgtttggggtggtttcgcgcaattacgttgtcgtacgtcacccattcccaaaacgggtgttggggtgcatacaaagcacgagtttttgccaccggaaccaattcttcgtttttcgtaacgaacatgcccaatcctctacttcaggtccaaaactcatgtttggggtggtttcgcgctatatcgttgccgcacgtcacccattccgaaaacgggtgtcggggtgcatacaaagcacgatttttttgccaccggaaccatttcttcgtttttcgcaacgaacatacccaatccactactttaagtccaaaactcatgtttggggtggtttcgtgcaatttcgttgccgcacgttgatgtagctgaagtgcccgatctttcggcgagtagagataattccgatttggcggaagttgacccttgcgatccgactacgacgagcaagcccgaggcgccaatgcaatcgctgaaccaactccctgtggttaccgaccttgctaatgcgagatcggcctgatcacgaagatcgtttcctgtgcgcaatcgaagaacgaacaagaaaaagatgcgagcaatctaatctattactcgagggtggagttctgaatacacgaagacagcgcagatttgcgcgtgttcgagagtagctaaagctaatgtaaaacaaaactcggaaaataaaggaggcgcagctcctgaataaatagagagggggcgcagcccctaggggcggccaaccctaggtcgtcaattatgggccgcaattgggctggtcgtctattcttccgggccttcgttctttaacaacatgatgtagttcaattctcttgcacgggcccgagtcactggcccaggtggaaggggtggcgcctgggctggagaaggtgctgctggtgtagatgtgctcgtgttggtgttgatgtccgcatcacacgtcaccctccgaaaacgggtgtcgagtgcatacaaagcacgagttttcgccaccggaaccatttcttcgtttttcgcaacgagcatgcccaatccactactttaggtccaaaactcatgtttggggtggtttcgcgcaatttcgttctcgaacgtcaccctttcccaaaacgggtgtcagggtgcatacaaagcacaagtttttgccaccggaagcaattcttcgtttttcgcaatgaacatgcccaatcctctactttagttccaaaactcatgtttggggtggtttcgcgctatatcgttgccgcacgtcacacattccgaaaacgggtgtcggggtgcatacaaagcacgagtttttgccatcggaaccatttcttcgtttttcgcaacgaacatgcccaatccactactataggtccaaaactcatgtttggggtggtttcacgcaatttcgttgtcgtacgtcacccattcccaaaacgggtgtcggggtgcatacaaagcacaagtttttgccaccggaaccaattcttcgtttttcgcaacgaacatgcccaatcctctactttaggtccaaaactcatgtttggtgtggtttcgcgctatatcgttgccgcacgtcaccctttcggaaaacgggtgttggggtgcatacaaagcacgagtttttgccaccggaacaaattcttcgtttttcgcaacgaacatgcccaatcctctactttaggtccaaaactcatgtttggggtggtttcgcgctatatcgttgccgcacatcacccattccgaaaacggatgtcggggtgcattccgaaaacgggtgtcgggtgcatacaaagcacgagtttttgccaccggaaccatttcttcgttttttgcaacgaacatgcccaatccactactttaggtccaaaactcatgtttggagtggtttcgcgcaatttcgttgtcacatgtcacccattccgaaaacgggtgtcgggtgcataaaagcacgagtttttgccaccggaaccatttcttcgtttttcgcaacgaacatgcccaatccactactttaggtccaaaactcatgtttggggtggttcgcgcaatttcgttgccgcacttcactcattccgaaaacgagtgtcgggtgcataaaaccacgagtttttgccaccggaaccatttcttcgtttttcgtaacgaacatgcccaatccactactttaggtccaaaactcatgtttggggtggtttcgcacaatttcgttgtcgcacgtcacccattcccaaaacgggtgtcgggtgcatacaaagcacgagtttttgccaccggaaccatttcttcgtttttcgcaacgaacatgcccaatccactactttaggtccaaaactcatgtttggggtggtttcgcacaatttcgttgtcgcacgtcacccattcccaaaacgggtgtcgggtgcatacaaagcacgagtttttgccaccggaaccatttcttcgtttttcgcaacgaacatgcccaatccactactttaggtccaaaactcatgtttggggtggtttcgcgcaattttgttgtggcacgtcacccattccgaaaacgggtgtcatggtgcatacaaagcacgagtttttgccaccggaaccatttcttcgtttttcgcaatgaacatgcccaatccactactttaggtacaaaactcatgtttggggtggtttcgcgcaatttcgttgtcacatgtcacccattccgaaaacgggtgtcgggtgcataaaagcacgagtttttgccaccggaaccatttcttcgtttttcgcaacgaacatgcccaatccactactttaggtccaaaactcatgtttggggtggtttcgcgcaatttcgttgtcgcacgtcacccattctgaaaacgggtgttgtggtgcatacaaagcacgagtttttgccaccggaaccatttcttcgtttttcgcaacgaacatgcccaatccactactttaggtccaaaactcatgtttggggtggttcgcgcaatttcgttgccgcacttcactcattccgaaaacgagtgtcgggtgcataaaaccacgagtttttgccaccggaaccatttcttcgtttttcgtaaagaacatgcccaatccactactttaggtccaaaactcatgtttagggtggtttcgcacaatttcgttgttgcacgtcacccattcccaaaacgggtgtcgggtgcatacaaagcacgagtttttgccaccggaaccatttcttcgtttttcgcaacgaacatgcccaatccactactttaggtccaaaactcatgcttggggtggtttcgcacaatttcgttgtcgcacgtcacccattctcaaaacgggtgtcgggtgcatacaaagcacgagtttttgccaccggaaccatttcttcgtttttcgcaacgaacatgcccaatccactactttaggtccaaaactcatgtttggggtggtttcgcgcaattttgttgtcgcacgtcacccattccgaaaacgggtgtcgtggtgcatacaaagcacgagtttttgccaccggaaccatttcttcgtttttcgcaatgaacttgcccaatccactactttaggtacaaaactcatgtttggggtggtttcgcgcaatttcgttgtcacatgtcacccattccgaaaacgggtgtcgggtgcataaaagcacgagtttttgccaccggaaccatttcttcgtttttcgcaacgaacatgcccaatccactactttaggtccaaaactcatgtttggggtggtttcgcgcaatttcgttgtcgcacgtcacccattctgaaaacgggtgtcgtggtgcatacaaagcacgagtttttgccaccggaaccatttcttcgtttttcgcaacgaacatgcccaatcctgatgaggacatcactatgagtacgactacaccagcagcacctccacatcaagcgccacttccttcattagctgggccaatcactcgggcccgtgccagagatcttaactttcgtcatgctactgaagaatgagggcccag

SEQ ID NO: 744 - DNA, 16298 bp, Zea mays
  source: /note="Zea mays BAC clone full insert sequence contig bacm2.pk174.e4.fis16"
tagtggatttgatgtagctgaggtgcccgatctttcggcgagtagagataattccgatttggcggaagatgacccttgcgatccgactacgacgagcaagcccgaggcgccaatgcaatcgctgaaccaactccctgtggttaccgaccttgctgatgcgagatcggcctgatcacgaagatcgtttcctgtgcgcaatcgaagaacgaacaagaaaaagaggcgagcaatctaatctattactcgagggtggagttctgaatacacgaagacagcgcagatttgcgcgtgttcgagagtagctaaggctaacgtaaaacaaaactcaggaaataaaggaggcgcagctcctgaataaatagagagggggcgcagcccctaggggcggccaaccctaggtcgtccattatgggcagcaattgggctggtcgtctattcttccgggccttcgttctttaacaacatgatgtagttcaattctcttgcacgggcccgagtcactggcccaggtggaaggggtggcgcctgggctggagaaggtgctgctggtgtagatgtgctcgtgttggtgttgatgtccgcatcaactcgtgcttttatgcactcgacacccgttttcggaatgggtgacgtgcggaaacgaaattgcgcgaaaccaccccaaacatgagttttggacctaaagtagtggattgggcatgttcgttgcgaaaatcgaagaaatggttccggtggcaaaaactcgtgctttgtatgcaccccgacacccgtttttggaatgggtgacgtgcgacaacgaaattgtgcgaaaccaccccaaacatgagttttggacctaaagtagtggattgggcatgttcgttgcgaaaaacgaagaaatggttccggtggcaaaaactcgtgctttgtatgcaccccgacaaccgttttcagaatgggtgacatgcggcaacaaaattgtgcgaaaccaccccaacacatgagttttgtacctaaagtagcggattgggcatgttcgttgcgaaaaacgaagaaatggttccggtggcaaaaactcgtgctttgtgatgaggacatcactatgagtacgactataccagcaacacctccacatcaagcgccacttccttcattagctgggccaatcactcgggcccgtgccagagatcttaacttcgtcatgctactgaagaatgagggcccagaagaatagacgaccagcccaactgcagcccatagtggacgacctagggttggccgccctaggggctgcgccccctctatttatgcaggagctgcgcctcctttattttcgagttttgttttacgttagccttagctactctcgaacacgcgcaaatctgcgctgtcttcgtgtattcagaactccaccctcgagtaatagattagattgctcgcatctttttcttgttcgttcttcgattgcgcacaggaaacgatcttcgtgatcagaccgatctcgcatcagcaaggtcggtaaccacagggagttggttcagcgattgcattggcgcctcgggcttgctcgtcgtagtcggatcgcaagggtcatcttccgccaaatcggaattatctctactcgccgaaagatcgggcacctcagctacatcactttgtatgcaccccgacacccgttttcggaatgggtgacgtgcgacaacgaaattgcgcgaaaccaccccaaacatgagttttggacctaaagtagtggattgggcatgttcgttgcgaaaaacgaagaaatggttccggtggcaaaaactcgtgcttttatgcactcgacacccgttttcggaatgggtgacgtgcggaaacgaaattgcgcgaaaccaccccaaacatgagttttggacctaaagtagtggattgggcatgttcgttgcgaaaatcgaagaaatggttccggtggcaaaaactcgtgctttgtatgcaccccgacacccgtttttggaatgggtgacgtgcgacaacgaaattgcgcgaaaccaccccaaacatgagttttggacctaaagtagtggattgggcatgttcgttgcgaaaaacgaagaaatggttccggtggcaaaaactcgtgctttatgcacccgacacccgatttcggaatgggtgacgtgcgacaacgaaattgtgcgaaaccaccccaaacatgagttttggacctaaagtagtggattggcatgttcgttacgaaaaacgaagaaatagttccggtggcaaaaatcgtgctttgtatgcaccccgacacccgttttcggaatgggtgacgtgcgacaacgaaattgcgcgaaaccaccccaaacatgagttttggacctaatgtagtggatttgatgtagctgaggtgcccgatctttcggcgagtagagataattccgatttggcggaagatgacccttgcgatccgactacgacgagcaagcccgaggcgccaatgcaatcgctgaaccaactccctgtggttaccgaccttgctgatgcgagatcggcctgatcacgaagatcgtttcctgtgcgcaatcgaagaacgaacaagaacaagatgcgagcaatctaatctattactcgagggtggagttctgaatacacgaagacagcgcagatttgcgcgtgttcgagagtagctaaggctaacgtaaaacaaaactcgagaataaaggaggcgcagctcctagataaatagagggggcgcagcccctaggggcagccaaccctaggtcgtccactatgggccgcagttgggctggtcgtctattcttctgggccctcattcttcagtagcatgacgaagttaagatctctagcacgggcccgagtgattggcccagctaatgaaggaagtggcgcttgatgtggaggtgctgctggtgtagtcgtactcatagtgatgtcctcatcatcctccccttcttgaagtgaagtcgtcctcgacgacaactcctcatcctcggccatatatggtttcaaatctgcaacattaaaactagtggaaacactaaattccgcaggcaggtcaaggatataagcattatcattaatctttgttagcaccttaaaaggaccagcagcacgaggcattaatttagaacgacgcaaagtaggaaaccgatcctttctcaagtgcaaccaaaccatatcacctggctcaaaagtaacatgttttcttcctttactaccagcaacctgatttttagcattagtagcagcaatgttctgtttcgtttgttcatgtatggtaatcatttgttcaacatgtgcagcagcatctacatgtggggcgttcgcagcattaagtgaaatcaaatcaataggtgccctagggatgtaaccataaacaatctggaaagggcacatctttgtagaagaatgcgtggcacgattgtaagcaaattcaacatgaggcaagcaatcctcccaacgtctcaaattcttgtctaaaacagccctaagcatggtagataaagttctatttactacctcagtttgtccatcagtctgagggtgacaagtagtgctaaacaacaatttagttcccaatttattccaaagagatctccaaaaatggcttagaaacttggcatcgcgatcagagactattgtttttggaataccatgtaaacgaataatttctctaaagaacaattcagcaacaatgctagcatcatcagttttatgacaaggtataaagtgagccattttagagaatctatcaacaaccacaaaaatactatccctccccttcttagttctaggcaagcccaaaacaaagtccatagagatatcaagccaaggagaagaagggacaggcaaaggcatatacaaaccaaggttgttcaaccgtgacttagctttctgacaagtagtgcaacgtgcaacaaggcgctccacatcagcgcgcatccgaggccaaaagaaatgggcagccaacacctcatgcgttttgtagacgccaaaatgccccatgagaccgcctccatgcgcttcctgtaacaacaaaagacgaaccgagctagctggaacacacagcttgttagcgcgaaacaggaacccatcctgtatgtgaaatttgccccatggtatcccattaatacaatgggcgaaagcatctttaaaatcagcttcgtcaacatattaatccttcacagtgtccaaaccaaagattttaaagtctaattgtgacagcatggtatagcgacgagacaaagcatcagcaataacattgtccttcccgttcttgtgtttaataatgtaaggaaaggactcaatgaattcgacccatttagcatgacgacggttcagatttgtttgggtacgaatatgttttaaagcctcatgatcagaatgaattatgaactcatgatgccaaagatagtgctgccaagtatgcaaagtgcgcactaaagtgtaaagctccttatcataagtagaatatttcagactagcaccgcttaatttttcactaaaataagcaactggttttccttcttgtaacaaaacagcacctagcccaataccgctagcatcgcattcaagctcaaaaactttattaaaatcaggcaattgcaagaggggagcttgggttaacttatctttcaaagtgctgaacgctacctcctgcgaatcactccaagcaaacggcacatctttctttgtaagctcatgtagaggcgctgcaatggagctaaaatcacgaacaaatctgcggtagaaaccggcaagtccaagaaagctccgaatttgtgtgaccgtcgtcggtgtaggccactcccgaatggcagcaatcttgctgctatccacctcaatgccctgcggagtaaccacataaccaagaaacgagacacgttgcgtgcaaaatgtgcacttttccatgttaccaaacaagcgagcagcacgcaaagcgtcaaaaacagcacgcaaatgttctaaatgctcctctatagacttgctgtaaataaggatatcatcgaaataaacaacaacaaacaaacctatgaaggcccgtagaacttcgttcattaaacgcataaaggtgctgggagcattagtcaatccaaatggcataaccaaccattcatataaaccaaattttgttttaaaagccgttttccattcatcaccgagtttcattctaatctgatggtaaccgctacgcaaatcaaccttagagaaaataacggcaccactaagctcatctagcatatcatcaaggcgtggaataggatatcgataacgaactgtgatgttattaatagcacgacaatctacgcacatacgccatgacccatctttctttggaacgagtaaaacaggaaccaagcaagggctaagagactcacgaatgtaacccttatcaagcagcgtctgcacctggcgctggatctccttcgtctcatctggatttgtacggtacggggcgcggtttggaagagaagcgccggggatgagatcgatctgatgctcaatgccacggaggggaggaagacccggtggtaagtccgtaggataaacatcagcatactcctgcaaaaggttaacaacagcaggggtatatccaaagacggtgcatcatcaagcggaacaagcattcgcgagcatacaagtgcataacagggcatatgagcttcatggagatcatcaaaatcagcacgtgtaccaagtaaaacaggagagtgcaacttgatttcagatttaataggtgtggctgatgtcgatttgacttgttgtgcagttttagcagctctagtaagatcatctttcaaaatttggtcaggggtcattggatgtataattattttctggcctttaaacatgaaagaataatgatttgaacgaccatgatgtaaactatcagtatcatattgccaaggtcgacctaataacaaagagcatgcttccataggaataacatcgcaatcagcataatcagaataagaacccagcgaaaaggggacacgtaccgaacgtgttacctttattttaccaccatcattaagccattgaatatgatacggatgtggatgtgtgcgagtgggcaaggataatttctctaccaacgctgtacttgccaaattgttgcagctgccactatcgatgatgatgcgaatcgaccgttcgtgcacgacgcccttggtatggaatagagtgtgtcgctgatttttttcggcctgggcaacctgtgtgctgagaacacgctgcacaacaagactctcatacctatcggcgtcgatgggatcaacgtggacttcctcattttctgcatggttagtggcaatcatagcatgactagtttcctcagaatcactagctgaagagtactcaccattgtcacgtataagcaaggtacgcttgtttgggcagtcccgaatcatgtgcccaaaccctctgcaacgatggcactgaatatcccgtgtacgtcctgtggaagaagcggcgcctttggcagggggcgccactggcttggtcgtccctgtgcgcgatgtagtgttaggcgtagaaggtgcagggctggaaggagttgagctgtgtgttggaccccggcctgcaaaagagttagtatatgtctttgatcgtcgtccctgcacttcacgttcagctttgcaagcatattcaaacaatgtggttatatcaaaataatccttataatcaagtatatcctgaatttccctgttcaaaccaccacgaaaacgcgccatagcagcgtcatcggactcaaccaaaccacaacgaagcatacccttttgcaactcctggtaatattcctcaacagattgtgaaccttgttgaaaacgctgcattttgttaagcaaatcacgagcataataggaaggaacaaatctgtggcgcatggcagtttttaattgggtccaagtaatgacactgttaatgggaagtttttgtttatactcacgccaccaaattaaagcaaaatcagtaaattcactaatggcagccttcacttggctattagcaggaatatcatggcatgaaaatttctgttctacctccaattcccaatcaagatatgcagcaggatcatatttaccattaaaagatggaattttaaatttaatcttagaaaataagtcattagggggatgacgaaccacacgacgtgcacgaccacggcgatctccatcgtcctgctcagtgtcaccgccgtattcttgctccatctttgtggtcaatgcatcaaggcgtgccaggatggtgtcgagtgtggtgcgagtcgccgtttgagcaaggtcaagttggttgaaacgctcggtcgtcgaagtgaccgttgaatcaagccgttcatgcatcgttctaatttcagcagcaagtccatcaacttgtcccctgacttcctgcaactgggcatccaccatgtcgtgtgctcctgccatagttagcgcaaacaccaaaacaccaaaaggagaaaaaccaacgacaaaaacaggggtgtactgctcacaaggcgctcacactagtgctgttatcaagttcttatccgttcttaccaagccacagtggtgaactgcaaccaacaggtggaaccggtgaaagattggattagcgattgcatggagaaacagaaaccttctcgtcgtagaaatatgtggagttttgggtaggctgcactcaagtcaaggattagcacgatcaaacaataatgcaaagttgaattatagtgcaaaacacgaaactatattgctggccacaagtgcaaaggacggatggaactagcagaatggcagtaccgtaaatattgtactagcgaggccactagtaggaatcacaagtgattttgtttttcttttttttgtatgatttttttgatatttttctcagcacaagaagcaacaaaataggagctacacgaagtttcacctaaagcagaaatcagatgtggtctacagaaaatcaggaagttctctaaaaagcgtgcgagaactttgacgaatttttttctttattttcctgaatttttttgacaattttgtcgaaaccaaacagaccgaatggtgtcaacaagctcctgtaaaaatttcagattttttggacacccgagcgaaaagttatgcccgttttacggaaaacgaccggaatgaaacaaccgtatcctttctccttcgttttctttttttttgtttctgttttttttgagtaaccgaaggagaaaaacaaggaagcggttgttgactcggtttgttttttttttcctattttttttcgtaaccgagggagaaaaacaaggaaacggccgttgactcggtttgttttttctgttttctttttgacgtaaccgaaggagaaaaacaaggagacgatgttgactcggtttgtggcgtgatcaaacgggagatggtggcggcgctaggatttgaatggtggaagaacacaatgcaaccagcaacaaggaaacgcgaaagcacacaaattcaacaatgcagattattgaaagaaagtgcgaggctcaaaagggtgctgggataagatctaacctgaatttttatgtggttttgtggactgtaggaaaaaatgctcgataaactcaccgatcaacctggaaatctgataccaattgatgtagctgaggtgcccgatctttcggcgagtagagataattccgatttggcggaagatgacccttgcgatccgactacgacgagcaagcccgaggcgccaatgcaatcgctgaaccaactccctgtggttaccgaccttgctgatgcgagatcggcctgatcacgaagatcgtttcctgtgcgcaatcgaagaacgaacaagaacaagatgcgagcaatctaatctattactcgagggtggagttctgaatacacgaagacagcgcagatttgcgcgtgttcgagagtagctaaggctaacgtaaaacaaaactcgagaataaaggaggcgcagctcctagataaatagagggggcgcagcccctaggggcggccaaccctaggtcgtccactatgggccgcagttgggctggtcgtctattcttctgggccctcattcttcagtagcatgacgaagttaagatctctggcacgggcccgagtgattggcccagctaatgaaggaagtggcgcttgatgtggaggtgctgctggtgtagtcgtactcatagtgatgtcctcatcaggattgggcatgttcgttgcgaaaaacgaagaaatggttccggtggcaaaaactcgtgctttgtatgcaccacgacacccgttttcagaatgggtgacgtgcgacaacgaaattgcgcgaaaccaccccaaacatgagttttggacctaaagtagtggattgggcatgttcgttgcgaaaaacgaagaaatggttccggtggcaaaaactcgtgcttttatgcacccgacacccgttttcggaatgggtgacatgtgacaacgaaattgcgcgaaaccaccccaaacatgagttttgtacctaaagtagtggattgggcaagttcattgcgaaaaacgaagaaatggttccggtggcaagaactcgtgctttgtatgcaccatgacacccgttttcggaatgggtgacgtgcgacaacgaaattgcgcgaaaccaccccaaacatgagttttggacctaaagtagtggattgggcatgttcgttgcgaaaaacgaagaaatggttccggtggcaaaaactcgtgctttgtatgcacccgacacccgttttcggaatgggtgacgtgcgacaacgaaattgcgcgaaaccaccccaaacatgagttttggacctaaagtagtggattgggcatgttcgttgcgaaaaacgaagaaatggttccggtggcaaaaactcgtgctttgtatgcacccgacacccgttttgggaatgggtgacgtgcgacaacgaaattgtgcgaaaccaccccaaacatgagttttggacctaaagtagtggattgggcatgttcgttacgaaaaacgaagaaatggttccggtggcaaaaactcgtggttttatgcacccgacactcgttttcggaatgagtgaagtgcggcaacgaaattgcgcgaaccaccccaaacatgagttttggacctaaagtagtggattgggcatgttcgttgcgaaaaacgaagaaatggttccggtggcaaaaactcgtgcttttatgcacccgacacccgttttcggaatgggtgacatgtgacaacgaaattgcgcgaaaccaccccaaacatgagttttgtacctaaagtagtggattgggcatgttcgttgcgaaaaacgaagaaatggttccggtggcaaaaactcgtgctttgtatgcaccacgacacccgttttcggaatgggtgacgtgcgacaacgaaattgcgcgaaaccaccccaaacatgacttttggacctaaagtagtggattgggcatgttcgttgcgaaaaacgaagaaatggttccggtggcaaaaactcgtgctttgtatgcacccgacacccgttttcggaatgggtgacgtgcgacaacgaaattgcgcgaaaccaccccaaacatgagttttggacctaaagtagtggattgggcatgttcgttgcaaaaaacgaagaaatggttccggtggcaaaaactcgtgctttgtatgcacccgacacccgttttcggaatgggtgacgtgcgacaacgaaattgcgtgaaaccaccccaaacatgagttttggacctaaagtagtggattaggcatgttcgttacgaagaacgaaatttcagattttttggacacccgagcgaaaagttatgcccgttttacggaaaacgaccggaatgaaacaaccgtatcctttctccttcgttttctttttttttgtttctgttttttttggacacccgagcgaaaagttatgcccgttttacggaaaacgaccggaatgaaacaaccgtatcctttctccttcgttttctttttttttgtttctgttttttttttgagtaaccgaaggagaaaaacaaggaagcagttgttgactcggtttgttttttttttcctattttttttcgtaaccgagggagaaaaacaaggaaacggccgttgactcggtttgttttttctgttttctttttgacgtaaccgaaggagaaaaacaaggagacgatgttgactcggtttgtggcgtgatcaaacgggagatggtggcggcgctaggatttgaatggtggaagaacacaatgcaaccagcaacaaggaaacgcgaaagcacacaaattcaacaatgcagattattgaaagaaagtgcgaggctcaaaagggtgctgggataagatctaacctgaatttttatgtggttttgtggactgtaggaaaaaacgctcgataaactcaccgatcaacctggaaatctgataccaattgatgtagctgaggtgcccgatctttcggcgagtagagataattccgatttggcggaagatgacccttgcgatccgactacgacgagcaagcccgaggcgccaatgcaatcgctgaaccaactccctgtggttaccgaccttgctgatgcgagatcggcctgatcacgaagatcgtttcctgtgcgcaatcgaagaacgaacaagaacaagatgcgagcaatctaatctattactcgagggtggagttctgaatacacgaagacagcgcagatttgcgcgtgttcgagagtagctaaggctaacgtaaaacaaaactcgagaataaaggaggcgcagctcctagataaatagagggggcgcagcccctaggggcggccaaccctaggtcgtccactatgggccgcagttgggctggtcgtctattcttctgggccctcattcttcagtagcatgacgaagttaagatctctggcacgggcccgagtgattggcccagctaatgaaggaagtggcgcttgatgtggaggtgctgctggtgtagtcgtactcatagtgatgtcctcatcaggattgggcatgttcgttgcgaaaaacgaagaaatggttccggtggcaaaaactcgtgctttgtatgcaccacgacacccgttttcagaatgggtgacgtgcgacaacgaaattgcgcgaaaccaccccaaacatgagttttggacctaaagtagtggattgggcatgttcgttgcgaaaaacgaagaaatggttccggtggcaaaaactcgtgcttttatgcacccgacacccgtttttggaatgggtgacatgtgacaacgaaattgcgcgaaaccaccccaaacatgagttttgtacctaaagtagtggattgggcaagttcattgcgaaaaacgaagaaatggttccggtggcaaaaactcgtgctttgtatgcaccacgacacccgttttcggaatgggtgacgtgcgacaacaaaattgcgcgaaaccaccccaaacatgagttttggacctaaagtagtggattgggcatgttcgttgcgaaaaacgaagaaatggttccggtggcaaaaactcgtgctttgtatgcacccgacacccgttttgggaatgggtgacgtgcgacaacgaaattgtgcgaaaccaccccaagcatgagttttggacctaaagtagtggattgggcatgttcgttgcgaaaaacgaagaaatggttccggtggcaaaaactcgtgctttgtatgcacccgacacccgttttgggaatgggtgacgtgcgacaacgaaattgtgcgaaaccaccctaaacatgagttttggacctaaagtagtggattgggcatgttcattacgaaaaacgaagaaatggttccggtggcaaaaactcgtggttttatgcacccgacactcgttttcggaatgagtgaagtgcggcaacgaaattgcgcgaaccaccccaaacatgagttttggacctaaagtagtggattgggcatgttcgttgcgaaaaacgaaaaaatggttccggtggcaaaaactcgtgctttgtatgcaccacgacacccgttttcagaatgggtgacgtgcgacaacgaaattgcgcgaaacccccccaaacatgatttttggacctaaagtagtggattgggcatgttctttgcaaaaaacaaaaaaatggttccggtggcaaaaactcgtgcttttatgcaccccacacccgttttcggaatgggtgacatgtgacaacaaaattgcgcgaaaacccccccaaacatgagttttgtacctaaaataatggataggggatgttcgttgcgaaaaacgaaaaaatggttcctgtggcaaaaactcgtgctttgtatgcaccatgacacccgttttgggaatgggtgacgtgcgacaaggaaatttgcgcgaaaccacccctaacttgagttttggacttaaatcctttgattgggcatttttgttacgaaaaacgaagaaatggtttcggtggcaaaaattggtgtttttatgcaccccgacacccgttttcggaatgggtgacgtgggacaacgaaattgcgcgaaaccaccccaaacatgagttttggacctaaagtagtggattgggcatgttcgttgcgaaaaacgaagaaatggtttcggtggcaaaaactcgtgcttttatgcactcgacacccgttttcggaatgggtgacgtgcggaaacgaaattgcgcgaaaccaccccaaacatgagttttggacctaaagtattggattgtgatgcggacatcaacaccaacacgagcacatctacactagcagcaccttctccagcccaggcgccaccccttccacctgggccagtgactcgggcccgtgcaagagaattgaactacatcatgttgttaaagaacgaaggcccggaagaatagacgaccagcccaattgcggcccataatggacgacctagggttggccgcccctaggggctgcgccccctctctatttattcaggagctgcgcctcctttatttcctgagttttgttttacgttagccttagctactctcgaacacgcgcaaatctgcgctgtcttcgtgtattcagaactccaccctcgagtaatagattagattgctcgcatcttgttcttgttcgttcttcgattgcgcacaggaaacgatcttcgtgatcaggccgatctcgcatcagcaaggtcggtaaccacagggagttggttcagcgattgcattggcgcctcgggcttgctcgtcgtagtcggatcgcaagggtcatcttccgccaaatcggaattatctctactcgccgaaagatcgggcacctcagctacatcaattggtatcagatttccaggttgatcggtgagtttatcgagcgttttttcctacagtccacaaaaccacataaaaattcaggttagatcttatcccagcacccttttgagcctcgcactttctttcaataatctgcattgttgaatttgtgtgctttcacgtttccttgttgctggttgcattgtgttcttccaccattcaaatcctagcgccgccaccatctcccgtttgatcacgccacaaaccgagtcaacatcgtctccttgtttttctccttcggttacgtcaaaaagaaaacagaaaaaacaaaccgagtcaacggccgtttccttgtttttctccctcggttacgaaaaaaaacaggaaaaaaaaaacaaaccgagtcaacaaccgcttccttgtttttctccttcggttactcaaaaaaaaacagaaacaaaaaaaaaagaaaacgaaggagaaaggatacggttgtttcatgatgcggacatcaacaccaacacgagcacatctacaccagcagcaccttctccagcccaggcgccaccccttccacctgggccagtgactcgggcccgtgcaagagaattgaactacatcatgttgttaaagaacgaaggcccggaagaatagacgaccagcccaattgcggcccataatggacgacctagggttggccgcccctaggggctgcgccccctctctatttattcaggagctgcgcctcctttatttccgagttttgttttacattagctttagctactctcgaacacgcgcaaatctgcgctgtcttcatgtattcagaactccaccctcgagtaatagattagattgctcgcatctttttcttgttcgttcttcgattgcgcacaggaaacgatcttcgtgatcaggccgatctcgcatcagcaaggtcggtaaccacagggagttggttcagcgattgcattggcgcctcgggcttgctcgtcgtagtcggatcgcaagggtcaacttccgccaaatcggaattatctctactcgccgaaagatcgggcacctcagctacatcaattggtatcagatttccaggttgatcggtgagtttatcgagcgttttttttcctacagtccacaaaaccacataaaattcaggttagatcttatcccagcacccttttgagcctcgcactttctttcaataatctgcattgttgaatttgtgtgctttcacgtttccttgttgctggttgcattgtgttcttccaccattcaaatcctagcgccgccaccatctcccctttgatcacgccacaaaccgagtcaacattgtttccttgtttttctccttcggttacgtcaaaaaaaacagaaaaaacaaaccgagtcaacggccgtttccttgtttttctccttcggttacgaaaaaaaaacagaaaaaaaaaccgagtcaacatcgtttccttgtttttctccttcggttacgtcaaaaaaaaaaaacagaaacaaaaaacaacgaaggagaaaggatacggttgtttcatcccggtcgtttgaaaacataacttgaggtaccttccttaaaccgggcataacttttcgctcgggtgtccgaaaaatctgaaatttttacaggagctagttgacaccattctgaggccggccaaactcacctacggtctgtttggggttcgacaaaattgtcaaaaaaattcaggaaaataaagaaaaaaatccgtcaaagttctcgcacgcttttcagagaacttcctgattttctgtagaccacatctgatatctgttttaggtgaaacttcgtgtagcttctatcttgttgcttcttgtgctgagaaaaatatcaaaaaaatcatacaaaaaagaaaaacaaaatcacctgtgatttctactagtgcctttttggcatcactagtacaatatttacggtactgccattctgctagttccatccatcctttgcacctgtggccagcaatatagtttcgtgttttgcactataattcaactttgcattattgtttgatcgtgctaatccttgacttgagtgcagcctacccaaaactc

SEQ ID NO: 745 - DNA, 819 bp, Zea mays
  VARIATION (14)..(101): /replace="c" or "g" or "t"
  misc_feature (14)..(101): /note="Nucleotides given in the sequence have no preference with respect to those in the annotations for said positions"
  source: /note="Zea mays BAC clone full insert sequence contig bacm.pk135.l06.fis1"
acatcgcgcatagaaaaaaaaaaaaaaaaaaaaaaaaaaaaaaaaaaaaaaaaaaaaaaaaaaaaaaaaaaaaaaaaaaaaaaaaaaaaaaaaaaaaaaaaatcgaccgttcgtgcacgacgcccttggtatggaatagagtgtgtcgctgatttttttcggcctgggcaacctgtgtgctgagaacacgctgcacaacctgtctcttatacacatctcaaccctgaagctcttgttggctagtgcgtagtcgttggcaagctctagaggatccccacggcttcccgtgggacgtgtagcagcacgcaagcacttctcaatgcagcaggcacaggatgcccgcacgaacgatgggacacgggcgccgggagtcggctgcacggcagcgggggtcctccaagcagtcacgggtccaagacaactcatgcgccagcgtagccgctacggtcgagccatccaaagcatccctccgcgctgggcgcggcgggtctacttgcgaggacggcgaccgaaggtccaccgagcacgggagaaatggaaaacgcatcgagcaacgggccatcccacagtgcagccactcgtccagggctgggcgcggtagggtgctgaccggccacggctaggccgcgagggggtgcggggctcggccgaggagacctggaggagacgctggaaacgctatggtttcagcagcgttccgcccgggtttcggctgcacgagttccctaccccctactatacctgaggggcataccccctcccaggacttcggggagttcagccttcagaaaaccagggtattttccctggacgccacga

SEQ ID NO: 746 - DNA, 821 bp, Zea mays
  VARIATION (14)..(101): /replace="c" or "g" or "t"
  misc_feature (14)..(101): /note="Nucleotides given in the sequence have no preference with respect to those in the annotations for said positions"
  source: /note="Zea mays BAC clone full insert sequence contig bacm.pk135.l06.fis2"
acgtcgcgcatagaaaaaaaaaaaaaaaaaaaaaaaaaaaaaaaaaaaaaaaaaaaaaaaaaaaaaaaaaaaaaaaaaaaaaaaaaaaaaaaaaaaaaaaacatacccaatccactactttaggtccaaaactcatgtttagggtggtttctcgcaatttcgttgtcacacgtcacccattccgaaaatgggtgtcgggtgcatacaaagcacgagtttttgccaccggaaccatttcttcgtttttcgcaacgaacatgcccaatccactactttaggtccaaaactcatgtttggggtggtttcgcgcaatttctttgccgcacgtggtcatttctaaaaacggtgtcggggtgcctacaatttccgaatttttgcccccaatccactagatgtggtccaaaacacaggtttggggtggtttcgcgcaatttcgatgccacccgtggccctttggaaaatggcggaatgggtgtgtcccaagaccaagtttttgcaccaagaaagatttggtcgttttaagaaacgaacatgcccaatccactaacttaagtccaaaaactatgtttgaggtgggtttgcacaatttatttgccccaggtcgtcgaagatgaaaaatacgggtgaggggtgtgtaagaccaaaatttttgacaaccagaacctttgcttcttttctagtcgttgaggtcgcctatctgttacattaggcaaaaaaaattaagatttgagggtgttccgcacaaattacttcgtcaacctcccatacatcacagacaaagagagtcgggtacaaaaagaacaaaaagttcggggtgcgag

SEQ ID NO: 747 - DNA, 821 bp, Zea mays
  VARIATION (8)..(71): /replace="c" or "g" or "t"
  misc_feature (8)..(71): /note="Nucleotides given in the sequence have no preference with respect to those in the annotations for said positions"
  source: /note="Zea mays BAC clone full insert sequence contig bacm.pk135.l06.fis3"
gatggataaaaaaaaaaaaaaaaaaaaaaaaaaaaaaaaaaaaaaaaaaaaaaaaaaaaaaaaaaaaaaaatggttccagtggcaaaaactcgtgctttgtgtgcacccgacacccgttttcggaatgggtaacgtgcgacaacgaaattgtgcgaaaccaccccaaacatgagttttggacctaaagtagtggattgggcatgttcattgcgaaaaacaaagaaatggttccggtggcaaaaactcgtgctttgtatgcacccgacacccgttttcggaatgggtgacgtgcgacaacgaaatcgcgagaaatcaccccaaacatgagttttggacctaaagtagtggattgggcatgttcgttacgaaaaacgaagaaatggttccggtggcaaaaactcgtgctttgtatgcaccccgacacccgttttcggaatgggtgacgtgcgacaatgaaattgcgcgaaaccaccccaaacatgagttttgtacctaaagtagtggattgggcatgttcgttgcgaaaaacaaaaaaatggttccggtggcaaaaactcgtgctttgtatgcacccccaacaacctttatcgaaatgggtgacgtgcggcaacaaaattgcgcgaaacccccccaaacatgatttttggacctaaagtagtggattgggcatgttcgttgcgaaaaacgaaaaaatggttccagtggcaaaaactcgtgctttgtatgcacccgacacccgttttcggaatgggtgacgtgcgacaatgaaattgtgcgaaaccaccccaaacatgagttttggatgtaaagtagtggattg

SEQ ID NO: 748 - DNA, 827 bp, Zea mays
  VARIATION (22)..(78): /replace="c" or "g" or "t"
  misc_feature (22)..(78): /note="Nucleotides given in the sequence have no preference with respect to those in the annotations for said positions"
  source: /note="Zea mays BAC clone full insert sequence contig bacm.pk135.l06.fis4"
acaaagtctgtaatgcagctaaaaaaaaaaaaaaaaaaaaaaaaaaaaaaaaaaaaaaaaaaaaaaaaaaaaaaaaaaaagtggtaaccttgagaagtgcacattttgcaccgatcgagtttcgtttcttggttatgttgtgactccacagggaattgaggttgatcaagccaaggtagaagcgatacatggatggcctatgccaaagactatcacacaggtgcggagtttcctaggacttgctggcttctatcgccgttttgtgaaggactttagcaccattgctgcacctttgaatgagcttacgaagaagggagtgcattttagttggggcaaagtacaagagcacgctttcaacgtgctgaaagataagttgacacatgcacctctcctccaacttcctgattttaataagacttttgagcttgaatgtgatgctagtggaattggattgggtggtgttttgttacaagaaggcaaacctgttgcatattttagtgaaaaattgagtgggtctgttctaaattattctacttatgataaggaattatatgctcttgtgcgaacattagaaacatgacagcattatttgtggcccaaagagtttgttattcattctgatcatgaatctttgaaacatattcgtagtcaaggaaaactgaaccgtagacatgctaagtgggttgaatttatcgaatcgtttccttatgttattaagcacaagaaaggaaaagagaatatcattgctgacgctttgtctaggagatatactttgctgaatcaacttgactacaaaatctttggattagagacgattaaagaccaat

SEQ ID NO: 749 - DNA, 217 bp, Zea mays
  source: /note="Zea mays BAC clone full insert sequence contig bacm.pk135.l06.fis5"
ccctaaaccctaaaccctaaaccctaaaccctaaaccctaaaccctaaaccctaaaccctaaaccctaaaccctaaaccctaaaccctaaaccctaaaccctaaaccctaaaccctaaaccctaaaccctaaaccctaaaccctaaaccctaaaccctaaaccctaaccctaaccctaaccctaaccctaaaccctaagggcgaattcgatatcaag

SEQ ID NO: 750 - DNA, 1133 bp, Zea mays
  source: /note="Zea mays BAC clone full insert sequence contig bacm.pk135.l06.fis6"
gaaaccaacctaaacatgagttttggacctaaagtagtggactgggcatgttcgttgcgaaaaacgaagaaatggttccggtggcaaaaactcgtgcttttatgcacccgatacccgttttcagaatgggtgacgtgcgacaacgaaattgcgcgaaaccacctcaaacatgagttttggacctaaagtagtgaattgggcatgttcgttgcgaaaaacgaagaaatggttccggtggcaaaaactcgtgctttgtatgcaccccgacaaccgttttcggaatgggtaacgtgcgacaacgaaattgtgcgaaaccaccccaaacatgagttttgtacctaaagtagtggattgggcatgttcgctacaaaaaacgaaaaaatggttccggtggcaaaaactcgtgcttttatgcaccccgatacccgttttcagaatgtgtgacgtgcgacaacgaaattgcgagaaactaaacatgagttttggacctaaagtagtggattgggcatgttcgttgcgaaaaacgaagaaatggttccggtggcaaaaactcgtgctttgtatgcaccccgacaaccgttttcggaatgggtgacgtgcggcaacgaaattgcgcgaaaccaccccaaacatgagttttggacctaaagtagtggattgggcatgttcgttgcgaaaaacgaagaaatggttccggtggcaaaaactcgtgctctgtatgcaccgacacccgtttttggaatgggtgacgtgcaacaacgaaattgtgcgaaaccaccccaaatatgagttttggacctaaagtagtggatttggcatgttcgttacgataaacgaagaaatggttccggtggcaaaaactcgtgcttttatgcacccgacactcgttttcggaatgagtgacgtgcgacaacgaaattgcgcgaaaccacccgaaacatgagttttgtacctaaagtagtggattgggcatgttcgttgcgaaaaacttagaaatagttccggtggcaaaaactcgtgctttgtatgcaccccgacaaccgttttcagaatgggtgacgtgcggcaacgaaattgcgtgaaaccaccccaaacatgagttttggacctaaagtactggattgggcatgccc

SEQ ID NO: 751 - DNA, 815 bp, Zea mays
  source: /note="Zea mays BAC clone full insert sequence contig bacm.pk135.l06.fis7"
gagttttgttttacgttagccttagctactctcgaacacgcgcaaatctgcgctgtcttcgtgtattcagaattccaccctcgagtaatagattagattgcttgcatctttttcttgttcgttcttcgattgcgcacaggaaacgatcttcgtgatcaggccgatctcgcatcagcaaggtcggtaaccacagggagttggttcagcgattgcattggcgcctcgggcttgctcgtcgtagtcggatcgcaagggccatcttccgccaaatcggaattatctctactcgccgaaagatcgggcacctcagctacatcatgcaccccgacacccgttttcggaatgggtgacgtgcgacaacgaaattgtgcgaaaccaccccaaacatgagttttggacctaaagtagtggattgggcatgttcgttgcgaaaaacgaaggaatggttcctgatgaggacatcactatcattgatacaaccataccagtgaccacttcaccattcgtagctaatcaaggaccaatgacacgagcccgtgcacgtaaacttaattatcaggtgaactcgttctttgctattgaagctaattcttctttaaatgaggtactaaagccttgcaatgactttattatgctcaggtgtttgggaggtgaaccatcttggattggagaaggcaacaaggcaataaaggctgctgcacccgagaggatttcgtaacagcacaagtacaagtttaaatggggcatatcttccaacttccaaggccgtttaatgcaaataaatacttgttggaaagctcccttcgtctacttgc

SEQ ID NO: 752 - DNA, 1941 bp, Zea mays
  source: /note="Zea mays BAC clone full insert sequence contig bacm.pk135.l06.fis8"
caatctttaggtccaaaactcatgtttggggtggtttcgcgcaatttcgttgccgcacgtcacccattctgaaaacggttgtcggggtgcatacaaagcacgatttttgccaccggaaccatttcttcgtttttcgcaacgaacatgcccaatccactactttaggtccaaaacccatgtttggggtggtttcgcgcaatttcgttgccgcacgtcactcattccgaaaacgagtgtcgggtgcataaaagcacgagtttttgccaccggaaccatttcttcgtttttcgtaacgaacatgcccaatccactactttaggtccaaaactcatgtttggggtggtttcgcgcaatttcgttgccgcacgtcacccattctaaaaacggttgtcgggggtgcatacaaagcacgagtttttgccaccggaaccatttatagtttttcgcaacgaacatgcccaacccactactttaggtccaaaactcatgtttggggtggtttcgcgcaatttcgttgccgcacgtcacccattctgaaaacggttttcggtacaaagcacgagttttttgccaccggaaccatttcttcgtttttcgcaacgaacatgcccaatccactactttaggtacaaaactcatgtttggggtggtttcgcgcaatttcgttgctgcacgtcactcattccgaaaacgagtgtcgcgtgcatacaaagcacgagtttttgccaccggaaccatttcttcgtttttcgcaacgaatatgcccaatccactacttcaggtccaaaactcatgtttggggtggtttcgcgcaatttcgttgccgcacgtcacccattccgaaaacggttgtcgggggtgcatacaaagcacgagtttttgccaccggaaccatttcttcgtttttcgcaacggacatgcccaatccactactttaggtccaaaactcatgtttgaggtggtttcgcgcaatttcgttgtcgcacgtcacccattctgaaaacgggtatcaggtgcataaaagcacgagtttttgccaccggaaccatttcttcgtttttcataacgaacatgcccaatccactactttaggtccaaaactcatgtttgaggtggtttcgcacaatttcgttgtcgcacgtcacccattccgaaaacgggtgtcgggtgcatacaaagcacgagtttttgccaccggaaccatttcttcgtttttcgcaacgaacttgcccaatccactactttaggtccaaaactcatgtttggggtggtttcgcgcaatttcgttgtcgcacgtcacccattccgaaaacgggtgtgggggatacaaagcacgagtttttgccaccggaaccatttcttcgtttttcgcaacgaacatgcccagtccactacttcaggtccaaaactcatgtttggggtggtttcgcacaatttcgttgccgcacgtggtcatttcgaaaaaggttgtcggggtgcatacaaagcacgagtttttgccaccggaaccattttttcgttttttgcaacgaacatgcccaatccactactttaggtccaaaactcatgtttggggtggtttcgcacaatttcgttgccgcacgtcacccattccgaaaacgtgtgtcggggtgcatacaaagcacgagtttttgccactggaaccatttctttgtttttcgcaacgaacatgcccaatccactactttaggtccaaaactcatgtttcaggtggtttcgcgcaatttcgttgccgcccgtcacccattctgaaaacgggtgtgggggtgcatacaaagcacgagtttttgccaccggtaccatttcatcgtttttcacaacgaacatgcccaatccactactttaggtccaaaactcatgtttgaggtggtttcgcgcaatttcgttgtcgcacgtcacccattctaaaaacgggtatcg

SEQ ID NO: 753 - DNA, 1140 bp, Zea mays
  source: /note="Zea mays BAC clone full insert sequence contig bacm.pk135.l06.fis9"
taaaaacaacacgcatgtgatcaacatgttcatccatagatttgctgtagatcaatatgtcatcaaagtatactaccacaaattttccaatgaaggcacgcaaaacctcgttcattaatctcatgaaagtgctaggtgcattagttaacccataaggcatgactaaccactcatacaatccgaacttagttttgaaagcagttttccattcatctcccaatttcatacgaatctggtggtacccactacgcaaatcaactttagaaaagacgatggcaccactcaattcatcaagcatatcatctaaacgtggaatagggtgtcgataccgtatcgtgatattattaatagccctacaatcaacacacatacgccatgttccatcttttttaggcactaaaataaccggaacagcacacggactaagagactcacgcacgtaacctttgtcgagtagttcttgcacttgtcgctgaatttcttttgtttcctctggatttgtcctatatggcgcacgatttggcaaagatgcaccaggaataagatcaatttggtgctcaatccctcgtataggtggcagcccctctggtatctcacttggaaatacatcagaatactcctgcaaaatgttagtaataacaggaggcaaagaatgctgcatatcttgaattgaaatcaaagcatccttgcataccaaggcgtaggcaacagtagtggaagcaaataattcattaacatcagtttttgtcgcaagcaagcaatgtcctttcaattttatcccatctttgttattaccaacagctttaatattcttgttgttctcagttttagctttggtagctttagcaacatcatcacgcacaatagcctcaggggacatgggaagcaaaataattttcttatcatggtgtatgagagaatattgatttgatctaccatgatgcattcaatctgaatcaaattgccatggtctacctagcagaatattacaagcatccataggcacaacatcacagtcaacaacatcacgatatgaaccaatagcaaaattaattcgtaccagcttggttaccttgaccttaccactattgttaagccattgaatgtgatatagatgcgggtgcggtttggtcgtaagtg

SEQ ID NO: 754 - DNA, 2566 bp, Zea mays
  source: /note="Zea mays BAC clone full insert sequence contig bacm.pk135.l06.fis10"
aggggcaaaattttgttttccgtagacccggccttcggttttgggaaggggtaagttaaacaacgaactgagggcaacccaccccaacttgagctttagaccttcgatttggaaggggttttattaacgaaaaaagaagaaatttgttcggtgacaaaaaattgtgctttctctgcaccccgatttcggtttttggaatgggggacgtgcggcaaggaaattgcccccaacccccccaaacttgggttttaaacctaagttaggggatttggcatgttagaagggaaaaaagaaaaaagggttccggaggcaaaaatttgtgctttgtatgcacccgacacccgtttttggaatgggtgacgtgcgacaacgaaaatgcgagaaaccaccccaaacatgagttttggacctaaagtagtggattgggcatgttcgttgcgaaaaaagaagaaatggttccagtggcaaaaactcgtgctttgtatgcaccccgacacccgttttcggaatgggtgacgtgtgacaacaaaattgcgcgaaaccaccccaaacatgagttttgtacctaaagtagtggattgggcatgttcgttgcgaaaaacaaagaaatggttccggtggcaaaaactcgtgctttgtatgcaccccgacaaccgttttcggaatgggtgacgtgcggcaacgaaattgcgcgaaaccaccccaaacatgagttttggacctaaagtagtggattgggcatgttcgttgcgaaaaacgaagaaatggttccggtggcaaaaactcgtgctttgtatgcacccccacacccgttttcggaatgggtgacgtgcgacaacgaaattgcgcgaaaccaccccaaacatgagttttggacctaaagtagtggattgggcatgttcgttgcgaaaaacgaagaaatggttccggtggcaaaaactcgtgctctgtatgcacccgacacccgttttcggaatgggtgacgtgcaacaacgaaattgtgcgaaaccacccaaacatgagttttggacctaaagtagtggattgggcatgttccttgcgaaaaacaaaaaaatggtttcggtggtaaaaactcgtgctttgtatgcaccccgataaccgttttcggaatgggtgacgtgcggcaacgaaattgcgcgaaaccaccccaaacatgagttttggacctaaagtagtggattgggcatgttcgttgcgaaaaacgaagaaatggttccggtggcaaaaactcgtgctttgtatgcaccccgacaaccgttttcagaatgggtgacgtgcgacaacgaaattgcgcgaaaccaccccaaacatgagttttggacctaaagtagtggattgggcatgttcgttgtgaaaaacgaagaaatggttccggtggcaaaaacttgtgctttgtatgcaccccgataatcgttttcggaatgggtgacatgcggcaacgaaattgcgcgaaaccaccccaaacatgagttttggacctaaagtagtggattgggcatgttcgttgcgaaaaacgaagaaatggttccggtggcaaaaactcgtgctttgtatgcacccgacacccgttttcggaatgggtgacgtgcgacaacgaaattgtgcgaaaccaccccaaacatgagttttggacctaaagtagtggattgggcatgttcgttgcgaaaaacgaagaaatggttccagtggcaaaaactcgtgctttgtatgcaccccgacactggttttcggaatgagtgacgtgcggcaacgaaattgcgcgaaaccaccccaaacatgagttttggacctaaagtagtggattgggcatgttcgttgcgaaaaacgaagaaatggttccggtggcaaaaactcgtgctttgtatgcacccgacacccgttttcggaatgggtgacgtgcgacaacgaaattgcgcgaaaccaccccaaacatgagttttggacctaaagtagtggattgggcatgttcgttgcgaaaaacgaagaaatggttccagtggcaaaaactcgtgctctgtatgcacctgacacccgttttcggaatgggtgacgtgcaacaacgaaattgtgccaaaccacccaaacatgagttttggacctaaagtagtggattaagcatgttcgttgcgaaaaacgaagaaatggttccggtggcaaaaactcgtgctttgtatgcacccgacacccgttttcggaatgggtgacgtgcgacaacgaaattgtgcgaaaccacaccaaacatgagttttggacctaaagtagtggattgggcatgttcgttgcgaaaaacgaagaaatggtttcggtggcaaaaatgatgtagctgaggtgcccgatctttcggcgagtagagataattccgatttggcggaagatgacccttgcgatccgactacgacgagcaagcccgaggcgccaatgcaatcgctgaaccaactccctgtggttaccgaccttgctgatgcgagatcggcctgatcacgaagatcgtttcctgtgcgtaatcgaagaacgaacaagaaaaaagatgcgagcaatctaatct

SEQ ID NO: 755 - DNA, 2003 bp, Zea mays
  source: /note="Zea mays BAC clone full insert sequence contig bacm.pk135.l06.fis11"
taaaactgcacaacaagtcaaatcgacatcagccgcacctattaaatctgaaatcaagttgcactctcctgttttacttgctacacgtgctgattttgatgatctctatgaagctcatatgccctgttatgcacttgtatgctcgcgcatgcttgttccgcttgatgatgcaccgtctttggatataccccctgctgttgttaaccttttgcaggagtatgctgatgtttatcctacggacttaccaccgggtcttcctcccctccgtggcattgagcatcagatcgatctcatccccggcgcttctcttccgaaccgcgccccgtaccgtacaaatccagaggagacgaaggagatccagcgccaggtgcagacgctgcttgataagggttacattcgtgagtctcttagcccttgctcggttcctgttttactcgttccaaagaaagatgggtcatggcgaatgtgcgtagattgtcgtgctattaataacatcacagttcgttatcgatatcctattccacgccttgatgatatgttagatgagcttagtggtgccgttattttctctaaggttgatttgcgtagcggttaccatcagattagaatgaaactcggtgatgaatggaaaacggcttttaaaacaaaatttggtttatatgaatggttggttatgccatttggaatgactaatgctcccagcacctttatgcgtttaatgaacgaagttctacgggccttcataggtttgtttgttgttgtttatttcgatgatatccttatttacagcaagtctatagaggagcatttagaacatttgcgtgctgtttttgatgctttgtgtgctgctcgcttgtttggtaacatggaaaagtgcacattttgcacgcaacgtgtctcgtttcttggttatgtggttactccgcagggcattgaggtggatagcagcaagattgctgccattcgggagtggcctacaccaacgacggtcacataaattcggagctttcttggacttgccggtttctaccgcagatttgttcgtgattttagctccattgcagcgcctctacatgagcttacaaagaatgatgtcccgtttgcttggagtgattcacaggaggtagcgttcagcactttgaaagataagttaacccaagctcccctcttgcaattgcctgattttaataaagtttttgagcttgaatgcgatgctagcggtattgggctaggtgctgttttgttacaagaaggaaaaccagttgcttattttagtgaaaaattaagcggtgctagtctgaaatattctacttatgataaggagctttacgctttagtgcgcactttgcgtacatggcagcactatctttggcatcatgagttcataattcattctgatcatgaggctttaaaacatattcgtacccaaacaaatctgaaccgtcgtcatgctaaatgggtcgaattcattgagtcctttccttacattattaaacacaagaacgggaaggacaatgttattgctgatgctttgtctcgtcgctataccatgctgtcacaattagattttaaaatctttggtttggacactgtgaaggatcaatatgttgacgatgctgattttaaagatgctttcggccatgtattaatgggataccatggggcaaatttcacatacaggatgggttcctgtttcgtgctaacaagctgtgtgttccagctagttcggttcgtcttttgttgttacagcaggcgcatggaggcggtctcatggggcattttggcgtctacaaaacgcatgaggtgttggctgcccacttcttttggcctcggatgcgcgctgatgttgcgcgccttgttgcacgttgcactacttgtcagaaagctaagtcacggttgaacaaccatggtttgtatatgcctttgcctgtcccttcttctccttggcttgatatctctatggactttgttttgggcttgcctacaactaagaaggggaggga

SEQ ID NO: 756 - DNA, 2791 bp, Zea mays
  source: /note="Zea mays BAC clone full insert sequence contig bacm.pk135.l06.fis12"
ccaaaactcatgtttaggttggtttcgcgcaatttcgttgccgcacatcacccattccgaaaacggttgtcggggtgcatacaaagcacgagtttttgccaccggaaccatttcttcgtttttcgcaacgaacatgcccaatccactactttaggtccaaaactcatgtttagggtggtttctcgcaatttcgttgccgcacgtcacccattctgaaaacggttgtcgtgcatacaaagcacgagtttttgccaccggaaccattttttcgtttttcgcaacgaacatgcccaatccactactttaggtccaaaactcatgtttggggtggtttcgcgcaatttcgttgtcgcacgtcacccattccgaaaacgggtgtcgggtgcataaaagcacgagtttttgccaccggaaccatttcttcgtttttcgcaacgaacatgcccaatccactactttaggtccaaaactcatgtttggggtggtttcgcgcaatttcgttgccgcacgtcacccattccgaaaacggtggtcggggtgcatacaaagcacgagtttttgccatcggaaccatttctttgtttttcgcaacgaacatgcccaatccactactttaggtccaaaactcatgtttagtttctcgcaatttcgttgtcgcacgtcacacattctgaaaacgggtatcggggtgcataaaagcacgagtttttgccaccggaaccatttcttcgtttttcgtaacgaacatgcccaatccactactttaggtccaaaactcaagtttggggtggtttcgcacaatttcgttgtcgcacgttacccattccgaaaacgggtgtcgggtgcacacaaagcacgagtttttgccactggaaccatttcttcgtttttcgcaacgaacatgcccaatccactactttaggtacaaaactcatgtttggggtggtttcacgcaatttcgttgtcacatgtcacccattccgaaaacgatggtcggggtgcatacaaagcacgagtttttgccactggaaccatttcttcgtttttcgcaacgaacatgcccaatccactactttaggtccaaaactcatgtttagggtggtctctcgcaatttcgttgtcacacgtcacccattccgaaaacgggtgtcgggtgcatacaaagcacgactttttgccaccggaacaatttcttcgtttttcgcaacaaacatgcccaatccactactttaggtccaaaactcatgtttggggtggcttcgcgcaatttcgttgccgcacgtcacccattctgaaaacggttgtcggggtgcatacaaagcacgagtttttgccaccggaaccatttctttgtttttcgcaatgaacatgcccaatccactactttaggtccaaaactcatgtttggggtggtttcgcgcaatttcgttgccgcacgtcacccattctgaaaacggttgtcggggtgcatagaaagcacgagtttttgccattggaaccatttctaagtttttcgcaacgaacatgcccaatccactactttaggtacaaaactcatgtttggggtggtttcgcgcaatttcgttgtcgcacgtcactcattccgaaaacgagtgtcgggtgcataaaagcacgagtttttgccaccggaaccatttcttcatttttcgtaacgaacatgccaaatccactactttaggtccaaaactcatatttggggtggtttcgcacaatttcgttgttgcacgtcacccattccgaaaacgggtgtcgggtgcatacagagcacgagtttttgccaccggaaccatttcttcgtttttcgcaacgaacatgcccaatccactactttaggtccaaaactcatgtttggggtggtttcgcgcaatttcgttgccgcacgtcacccattccgaaaacggttgtcggggtgcatacaaagcacgagtttttgccaccggaaccatttcttcgtttttcgcaacgaacatgcccaatccactactttaggtccaaaacacatgtttggggtggtttcacgcaatttcgttgtcgcacgtcacccattccgaaaacgggtgtcgggtgcatacaaagcacgagtttttgccaccggaaccatttcttcgtttttcgcaacgaacatgtccaatccactactttacatccaaaactcatgtttggggtggtttcgcgcaatttcgttgtcgcacgtcacccattccaaaaacgggtgtcgggtgcataaaaagcacgagtttttgccaccggaaccatttctttgtttttcgcaacgaacatgcccaatccactactttaggtccaaaactcatgtttggggtggtttcgcacaattttgttgtcgcacgtcacccattccgaaaacgggtgtcggggtgcatgatgtagctgaggtgcccgatctttcggcgagtagagataattccgatttggcggaagatggcccttgcgatccgactacgacgagcaagcccgaggcgccaatgcaatcgctgaaccaactccctgtggttaccgaccttgctgatgcgagatcggcctgatcacgaagatcgtttcctgtgcgcaatcgaagaacgaacaagaaaaagatgcaagcaatctaatctattactcgagggtggaattctgaatacacgaagacagcgcagatttgcgcgtgttcgagagtagctaaggctaacgtaaaacaaaactcgaaaataaaggaggcgcagctcctggataaatagagggggcgcagcccctagggcggccaaccctaggtcgt

SEQ ID NO: 757 - DNA, 4382 bp, Zea mays
  source: /note="Zea mays BAC clone full insert sequence contig bacm.pk135.l06.fis13"
acatgcccaatctactactttaggtccaaaactcatgtttgaggtggttttgcacaatttcgttgtcgcacgtcacccattccgaaaacgggtgtcgggtgcatacaaagcacgagtttttgccaccggaaccatttcttcgtttttcgcaacgaacttgcccaatccactactttaggtccaaaactcatgtttggggtggtttcacgcaatttcgttgacgcacgtcacccattccgaaaacgggtgtgggggtgcatacaaagcacgagtttttgccaccggaaccatttcttcgttttccgcaacgaacatgcccagtccactactttaggtccaaaactcatgtttaggttggtttcgcgcaatttcgttgccgcacgtcacccattccgaaaacggttgtcggggtgcatacaaagcacgagtttttgccaccggaaccatttcttcgtttttcgcaacgaacatgcccaatccactactttaggtccaaaactcatgtttagggtggtttctcgcaatttcgttgccgcacgtcacccattctgaaaacggttgtcgtgcatacaaagcacaagtttttaccaccggaaccatttcttcgtttttcgcaacgaacatgcccaatccactactttaggtccaaaactcatgtttggggtggtttcgcgcaatttcgttgccgcacgtcacccattctaaaaacggttgtcgggggtgcatacaaagcacgagtttttgccaccagaaccatttatcgtttttcgcaacgaacatgcccaacccactactttaggtccaaaactcatgtttggggtggtttcgcgcaatttcgttgccgcacgtcacccattctgaaaacggttgtcgggggtgcatacaaagcacgatttttgccaccggaaccatttcttcgtttttcgcaatgaacatgcccaatccactactttaggtccaaaacccatgtttggggtggtttcgcgcaatttcgttgccgcacgtcactcattccgaaaacgagtgtcgggtgcataaaagcacgagtttttgccaccggaaccatttcttcttttttcgtaacgaacatgcccaatccactactttaggtccaaaactcatgtttggggtggtttcgcgcaatttcgttgccgcacgtcacccattccaaaaacgggtgtcgggtgcatacaaagcacgagtttttgccaccggaaccatttcttcgtttttcgcaacgaacatgcccaatccactactttaggtacaaaactcatgtttggggtggttttgcgcaatttcgttgtcacacgtcacccattctgaaaacgggtgtcggggtgcatacaaagcacgagtttttgccaccggaaccatttcttcgtttttcgcaacgaacatgcccaatccactactttaggtccaaaactcatgtttggggtgatttctcgcaatttcgttgtcacacgtcacccattccgaaaacaggtgtcggggtgcatacaaagcacgagtttttgccaccggaaccatttcttcgtttttcgcaacgaacatgcccaatccactactttaggtccaaaactcatgtttggggtgatttctcgcaatttcgttgtcgcacgtcacccattccgaaaacgggtgttgggtgcatacaaagcacgagttttttgccaccggaaccatttcttcgtttttcgcaacgaacatgcccaatccactactttaggtccaaaactcatgtttggggtggtttcgcgcaatttcgttgccgcacgtcacccattctaaaaacggttgtcgggggtgcatacaaagcacgagtttttgccaccggaaccatttatcgtttttcgcaacgaacatgcccaacccactactttaggtccaaaactcatgtttggggtggtttcgcgcaatttcgttgccgcacgtcacccattctgaaaacggttgtcggggtgcatacaaagcacgatttttgccaccggaaccatttcttcgtttttcgcaacgaacatgcccaatccactactttaggtccaaaacccatgtttggggtggtttcgcgcaatttcgttgccgcacgtcactcattccgaaaacgagtgtcgggtgcataaaagcacgagtttttgccaccggaaccatttcttcgtttttcgtaacgaacatgcccaatccactactttaggtccaaaactcatgtttggggtggtttcgcgcaatttcgttgccgcacgtcacccattctaaaaacggttgtcgggggtgcatacaaagcacgagtttttgccaccggaaccatttatagtttttcgcaacgaacatgcccaacccactactttaggtccaaaactcatgtttggggtggtttcgcgcaatttcgttgccgcacgtcacccattttgaaaacggttgtcggggtgcatacaaagcacgagttttttgccaccggaaccatttcttcgtttttcgcaacgaacatgcccaatccactactttaggtacaaaactcatgtttggggtggttttgcgcaatttcgttgtcacacgtcaccctttccgaaaacgggtgtcggggtgcatacaaagcacgagtttttgccaccggaaccatttcttcgtttttcgcaacgaacatgcccaatccactactttaggtccaaaactcatgtttagggtggtctctcgcaatttcgttgtcacacgtcacccattccgaaaacgggtgtcgggtgcatacaaagcacgactttttgccaccggaacaatttcttcgtttttcgcaacaaacatgcccaatccactactttaggtccaaaactcatgtttggggtggcttcgcgcaatttcgttgccgcacgtcacccattctgaaaacggttgtcggggtgcatacaaagcacgagtttttgccaccggaaccatttcttcgtttttcgcaacgaacatgcccaatccactactttaggtccaaaactcatgtttgaggtggtttcgcgcaatttcgttgtcgcacgtcacccattctgaaaacgggtatcaggtgcataaaagcacgagtttttgccaccggaaccatttcttcgtttttcataacgaacatgcccaatccactactttaggtccaaaactcatgtttgaggtggtttcgcacaatttcgttgtcgcacgtcacccattccgaaaacgggtgtcgggtgcatacaaagcacgagtttttgccaccggaaccatttcttcgtttttcgcaacgaacttgcccaatccactactttaggtccaaaactcatgtttggggtggtttcgcgcaatttcgttgtcgcacgtcacccattccgaaaacgggtgtcgcgtgcatacaaagcacgagtttttgccaccggaaccatttcttcgtttttcgcaacgaatatgcccaatccactactttggtccaaaactcatgtttggggtggtttcgcgcaatttcgttgccgcacgtcacccattccgaaaacggttgtcggggtgcatacaaagcacgagtttttgccaccggaaccatttcttcgtttttcgcaacgaacatgcccaatccactactttaggtccaaaactcatgtttggggtggtttcgcgcaatttcgttgccgcacgtcacccattccgaaaacggttgtcggggtgcatacaaagcacgagtttttgccaccggaaccatttcttcgtttttcgcaacgatcatgcccaatccactactttaggtccaaaactcatgtttagtttctcgcaatttcgttgtcgcacgtcacacattctgaaaacgggtatcggggtgcataaaagcacgagtttttgccaccggaaccatttcttcgtttttcgtagcgaacatgcccaatccactactttaggtccaaaactcatgtttggggtggtttcgcacaatttcattgtcgcacgttacccattccgaaaacgggtgtcgggtgcacacaaagcacgagtttttgccaccggaaccatttttttgtttttcgcaacgaacatgcccaatccactactttaggtacaaaaatcatgtttggggtggtttcacgcaatttcgttgtcacatgtcacccattccgaaaacgggtgtcggggtgcatacaaagcacgagtttttgccactggaaccatttcttcgtttttcgcaacgaacatacccaatccactactttaggtccaaaactcatgtttggggtggtttctcgcaatttcgttgtcacacgtcacccattccgaaaatgggtgtcgggtgcatacaaagcacgagtttttgccactggaaccatttcttcgtttttcgcaacaaacatgcccaattcactactttaggtccaaaactcatg

SEQ ID NO: 758 - DNA, 3540 bp, Zea mays
  source: /note="Zea mays BAC clone full insert sequence contig bacm.pk135.l06.fis14"
taccgtacgcatgatgtctggcgtgctgcgtgacgcggcccgtgcccctcgtcgaagggatcgagcattgtggtctaaattatattgggttaccccatggtttttttgtcccccttgtttgaagtgcagtttatctatctttatacatatatttaaactttactctacgaataatataatctatagtactacaataatatcagtgttttagagaatcatataaatgaacagttagacatggtctaaaggacaattgagtattttgacaacaggactctacagttttatctttttagtgtgcatgtgttctcctttttttttgcaaatagcttcacctatataatacttcatccattttattagtacatccatttagggtttagggttaatggtttttatagactaatttttttagtacatctattttattctattttagcctctaaattaagaaaactaaaactctattttagtttttttatttaataatttagatataaaatagaataaaataaagtgactaaaaattaaacaaataccctttaagaaattaaaaaaactaaggaaacatttttcttgtttcgagtagataatgccagcctgttaaacgccgtcgacgagtctaacggacaccaaccagcgaaccagcagcgtcgcgtcgggccaagcgaagcagacggcacggcatctctgtcgctgcctctggacccctctcgagagttccgctccaccgttggacttgctccgctgtcggcatccagaaattgcgtggcggagcggcagacgtgagccggcacggcaggcggcctcctcctcctctcacggcaccggcagctacgggggattcctttcccaccgctccttcgctttcccttcctcgcccgccgtaataaatagacaccccctccacaccctctttccccaacctcgtgttgttcggagcgcacacacacacaaccagatctcccccaaatccacccgtcggcacctccgcttcaaggtacgccgctcgtcctccccccccccccctctctaccttctctagatcggcgttccggtccatggttagggcccggtagttctacttctgttcatgtttgtgttagatccgtgtttgtgttagatccgtgctgctagcgttcgtacacggatgcgacctgtacgtcagacacgttctgattgctaacttgccagtgtttctctttggggaatcctgggatggctctagccgttccgcagacgggatcgatttcatgattttttttgtttcgttgcatagggtttggtttgcccttttcctttatttcaatatatgccgtgcacttgtttgtcgggtcatcttttcatgcttttttttgtcttggttgtgatgatgtggtctggttgggcggtcgttctagatcggagtagaattctgtttcaaactacctggtggatttattaattttggatctgtatgtgtgtgccatacatattcatagttacgaattgaagatgatggatggaaatatcgatctaggataggtatacatgttgatgcgggttttactgatgcatatacagagatgctttttgttcgcttggttgtgatgatgtggtgtggttgggcggtcgttcattcgttctagatcggagtagaatactgtttcaaactacctggtgtatttattaattttggaactgtatgtgtgtgtcatacatcttcatagttacgagtttaagatggatggaaatatcgatctaggataggtatacatgttgatgtgggttttactgatgcatatacatgatggcatatgcagcatctattcatatgctctaaccttgagtacctatctattataataaacaagtatgttttataattattttgatcttgatatacttggatgatggcatatgcagcagctatatgtggatttttttagccctgccttcatacgctatttatttgcttggtactgtttcttttgtcgatgctcaccctgttgtttggtgttacttctgcaggtcgaccgccggggatccacacgacaccatgtcccccgagcgccgccccgtcgagatccgcccggccaccgccgccgacatggccgccgtgtgcgacatcgtgaaccactacatcgagacctccaccgtgaacttccgcaccgagccgcagaccccgcaggagtggatcgacgacctggagcgcctccaggaccgctacccgtggctcgtggccgaggtggagggcgtggtggccggcatcgcctacgccggcccgtggaaggcccgcaacgcctacgactggaccgtggagtccaccgtgtacgtgtcccaccgccaccagcgcctcggcctcggctccaccctctacacccacctcctcaagagcatggaggcccagggcttcaagtccgtggtggccgtgatcggcctcccgaacgacccgtccgtgcgcctccacgaggccctcggctacaccgcccgcggcaccctccgcgccgccggctacaagcacggcggctggcacgacgtcggcttctggcagcgcgacttcgagctgccggccccgccgcgcccggtgcgcccggtgacgcagatggatccaccggtcgccaccatggcctcctccgagaacgtcatcaccgagttcatgcgcttcaaggtgcgcatggagggcaccgtgaacggccacgagttcgagatcgagggcgagggcgagggccgcccctacgagggccacaacaccgtgaagctgaaggtgaccaagggcggccccctgcccttcgcctgggacatcctgtccccccagttccagtacggctccaaggtgtacgtgaagcaccccgccgacatccccgactacaagaagctgtccttccccgagggcttcaagtgggagcgcgtgatgaacttcgaggacggcggcgtggcgaccgtgacccaggactcctccctgcaggacggctgcttcatctacaaggtgaagttcatcggcgtgaacttcccctccgacggccccgtgatgcagaagaagaccatgggctgggaggcctccaccgagcgcctgtacccccgcgacggcgtgctgaagggcgagacccacaaggccctgaagctgaaggacggcggccactacctggtggagttcaagtccatctacatggccaagaagcccgtgcagctgcccggctactactacgtggacgccaagctggacatcacctcccacaacgaggactacaccatcgtggagcagtacgagcgcaccgagggccgccaccacctgttcctgtagcggccggccgcaacctagacttgtccatcttctggattggccaacttaattaatgtatgaaataaaaggatgcacacatagtgacatgctaatcactataatgtgggcatcaaagttgtgtgttatgtgtaattactagtctgcagcatttggctaccttaagagagtcatagttatagctcgagcggccagcttgatatcgaattcgcccttagggtttagggtttagggtttagggtttagggtttagggttctg

SEQ ID NO: 759 - DNA, 7739 bp, Zea mays
  source: /note="Zea mays BAC clone full insert sequence contig bacm.pk135.l06.fis15"
aatctaaattgttgcctcgagccgatggaccgtttaaagtgctagagaaaattaacgacaatgcatataggctagatctgcctgcagactttggggttagccccacatttaacattgcagatttaaagccctacttgggagaggaagttgagcttgagtcgaggacgactcaaatgcaagaaggggagaatgatgaagacatccacactgctgatacatctatgccaatacaagtaccaatttctggtcccattactcgcgcttgtgctcgtcaactcaaccatcaggtgattacactcttgagttcatgtccatcttatttagaccatggagacccgtgcactcttgttttgcttaggaaccagggagaagaccgaaagggaaaaggatttgaacatgctggattcggactgcagaagaacaccaacttgtgacggtcaccacggtcagatgcgggctcggattggaatgttcaagcacaacatggaacgcttatcaagtctactttcatatggatccggaattatagtcatatctgttctgaggccgccgtaatcattgttttcttaccgagatattttctgccttttctgcccatggtgctgcgtcaccctattttggcccaatgggtcgtgtatcaagttaggtccattagggacgcaacctagggttgcagcacgaccccaatacccttgtggtcgtcctcccatgtttatagaccctctagccgccaccaagaacagcgggttttgtttagatcaagtttagctctcgctacttgcttgcaagtgcgcgtgctagttcagccgcccgtcttcttgtcttcggaaccccaccatattggagtttgactttgaaacctacatttagatctggtaattcagtacttgttctacttgttcttgctagttcttcgattgtttgcaggacgagtgccctagtggccagggtgtcacgctccacaagatcgtgacagccataggaggtggtgtatcggttgctaaggcgcagcgtctttggaaggctgtagtcgggtcgtgaacgtcgtctcctcccccaattgagttattccacaccctctcatcgaaagaccgggcaatcacccaacgggtgcacatcaaaaccacctcaaacatgagttttggacctaaagtagtggattgggcatgttcgttgtgaaaaacgaagaaatggttccggtggtaaaaactcgtgctctgtatgcacccgacacccgttttcggaatgggtgacgtgcgacaacgaaattgcgagaaatcaacccaaacaagagttttggacctaaagtagtggattgggcaagttcgttgcgaaaaacgaagaaatggttccggtggcaaaaactcgtgcttttatgcacccgacacccgttttcggaatgggtgacgtgcgacaacgaaattgcgcgaaaccaccccaaacatgagttttggacctaaagtagtggattgggcatgttcgttgcgaaaaacgaagaaatggttccggtggcaaaaactcgtgctctgtatgcacccgacacccgttttcggaatgggtgacgtgcaacaacgaaattgtgcgaaaccaccccaaacatgagttttggacctaaagtagtggattgggcatgttcgttgcgaaaaacgaagaaatggttccggtggcaaaaactcgtgctttgtatgcacccgacacccgttttcggaatgggtgacgtgcgacaacgaaattgcgagaaatcaccccaaacaagagttttggacctaaagtagtggattaggcatgttcgttgcgaaaaacgaagaaatggttccggtggcaaaaactcgtgctttgtatgcaccccgacacccgttttcgaaatgggtgacgtgtgacaacgaaattgcgcaaaaccaccccaaacatgagttttgtacctaaagtagtggattgggcatgttcgttgcgaaaaacgaagaaatggttccggtggcaaaaactcgtgctttgtatgcaccccgacaaccgttttcggaatgggtgacgtgcggcaacgaaattgcgcgaaaccaccccaaacatgagttttggacctaaagtagtggattgggcatgttcgttgcgaaaaacgaagaaaatggttccggtggcaaaaactcgtgctttgtatgcacccgacacccgttttcggaatgggtgacgcgcgacaacgaaattgcgcgaaaccaccccaaacatgagttttggacctaaagtagtggattgggcatgttcgttgcgaaaaaagaagaaatggttccggtggcaaaaactcgtgcttttatgcacccgacactggttttcggaatgagtgacgtgcgacaacgaaattgcgcgaaaccaccccaaacatgagttttggacctaaagtagtggattgggcatgttcgttgtgaaaaacgaagaaatggttccggtggcaaaaactcgtgctttgtatgcacccccacacccgttttcggaatgggtgacgtgcgacaacgaaattgcgcgaaaccaccccaaacatgagttttggacctaaagtagtggattgggcatgttcgttgcgaaaaacgaagaaatggttccggtggcaaaaactcgtgctctatatgcacccgacacccgttttcggaatgggtgacgtgcaacaatgaaattgtgcgaaaccacccaaacatgagttttggacctaaagtagtggattgggcatgttcgttgcgaaaaacgaagaaatggtttcggtggcaaaaactcgtgctttgtatgcaccccgataaccgttttcggaatgggtgacgtgcggcaacgaaattgcgcgaaaccaccccaaacatgagttttggacctaaagtagtggattgggcatgttcgttgcgaaaaacgaagaaatggttccggtggcaaaaactcgtgctttgtatgcacccccacacccgttttcagaatgggtgacgggcggcaacgaaattgcgcgaaaccacccacaacatgagttttggacctaaagtagtggattgggcatgttcgttgcgaaaaacaaaaaaatggttccagtggcaaaaactcgtgctttgtatgccccccgacacacgttttcggaatgggtgacgtgcggcaacgaaattgtgcgaaaccaccccaaacatgagttttggacctaaagtagtggattgggcatgttcgttgcgaaaaaagaagaaatggttccggtggcaaaaactcgtgctttgtatgcaccccgacaacctttttggaaatgaccacgtgcggcaacgaaattgtgcgaaaccaccccaaacatgagttttggacctgaagtagtggattgggcatgttcgttgcgaaaaacgaagaaatggttccggtggcaaaaactcgtgctttgtatgcacccgacacccgttttcggaatgggtgacgtgcgacaacgaaattgcgcgaaaccaccccaaacatgagttttggatgtaaagtagtggattgggcatgttcgttgcgaaaaacgaagaaatgattccggtggcaaaaactcgtgctttgtatgcacccgacacccgttttcggaatgggtgaagtgcgacaacgaaattgtgcgaaaccaccccaaacatgagttttggacctaaagtagtggattgggcatattcgttacaaaaaacgaagaaatggttccggtggcaaaaactcgtgcttttatgcaccccgatacccgttttcagaatgggtgacgtgcgacaacgaaattgcgcgaaaccacctcaaacatgagttttggacctaaagtagtggattgggcatgttcgttgtgaaaaacgaagaaatggttccggtggcaaaaactcgtgctttgtatgcacccccgacaaccgtttttagaatgggtgacgtgcggcaacgaaattgcgcgaaaccaccccaaacatcagttttggacctaaagtagtggattgggcatgttcgttgcgaaaaacgaagaaatggttccggtggcaaaaaactcgtgctttgtatgcacccaacacccgttttcggaatgggtgacgtgcgacaacgaaattgcgagaaatcaccccaaacatgagttttggacctaaagtagtggattgggcatgttcgttgcgaaaaacgaagaaatggttccggtggcaaaaactcgtgctttgtatgcaccccgacacctgttttcggaatgggtgacgtgtgacaacgaaattgcgagaaatcaccccaaacatgagttttggacctaaagtagtggattgggcatgttcgttgcgaaaaacgaagaaatggttccggtggcaaaaactcgtgctttgtatgcaccccgacacctgttttcggaatgggtgacgtgtgacaacgaaattgcgcaaaaccaccccaaacatgagttttgtacctaaagtagtggattgggcatgttcgttgcgaaaaacgaagaaatggttccggtggcaaaaaactcgtgctttgtaccgaaaaccgttttcagaatgggtgacgtgcggcaacgaaattgcgcgaaaccaccccaaacatgagttttggacctaaagtagtgggttgggcatgttcgttgcgaaaaactataaatggttccggtggcaaaaactcgtgctttgtatgcacccccgacaaccgtttttagaatgggtgacgtgcggcaacgaaattgcgcgaaaccaccccaaacatgagttttggacctaaagtagtggattgggcatgttcgttacgaaaaacgaagaaatggttccggtggcaaaaactcgtgcttttatgcacccgacactcgttttcggaatgagtgacgtgcggcaacgaaattgcgcgaaaccaccccaaacatgggttttggacctaaagtagtggattgggcatgttcgttgcgaaaaacgaagaaatggttccggtggcaaaaactcgtgctttatatgcacccccgacaaccgttttcagaatgggtgacgtgcgggaacgaaattgcgcgaaaccaccccaaacatgagttttggacctaaagtagtggtggattgggcatgttcgttgcgaaaaacgaagaaatagttctggtggcaaaaactcgtgcttttatgcacccgacacccgttttcggaatgggtgacgtgcggcaacgaaattgcgcgaaaccaccccaaacatgagtgttgtacctaaagtagtggattgggcatgttcgttgcgaaaaacgaaaaaatggttccggtggcaaaaactcgtgctttgtatgcaccccgacaaccgttttcagaatgggtgacgtgcggcaacgaaattgcgcgaaaccaccccaaacatgagttttggacctaaagtagtagattgagcatgttcgttgcgaaaaacgaaaaaatggttccggtggcaaaaactcgtgctttgtatgcaccccacacccgttttcggaatgggtgacgtgtgacaacgaaattgcgcgaaacaaccccaaacatgagttttgtacctgaagtagtggattgggcatgttcgttgcgaaaaaacgaaaaaaatggttccggtggcaaaaaactcgtgctttttatgcaccccccacacccgttttcggaatgggtgacgtgcgacaacgaaattgcgcgaaaccaccccaaacatgagttttggacctaaagtagtggattgggcaagttcgttgcgaaaaacgaagaaatggttccgttggcaaaaactcgtgctttgtatgcacccgacacccgtttttggaatgggtgacgtgcgacaacgaaattgtgcgaaaccacctcaaacatgagttttggacctaaagtagtggattgggcatgttcgttacgaaaaacgaagaaatggttccggtggcaaaaactcgtgcttttatgcacccgatacccgttttcagaatgggggatgacgtgcgacaacgaaattgcgcaaaaccacctcaaacatgagttttggacctaaagtagtggattgggcatgttcgttgcgaaaaacgaagaaatggttccggtggcaaaaactcgtgctttgtatgcaccccgacaaccgttttcgaaatgaccacgtgcggcaacgaaattgcgcgaaaccaccccaaacatgagttttggacctaaagtagtggattgggcatgttcgttgcgaaaaacgaagaaatggttccggtggcaaaaactcgtgctttgtatgcacccgacacccgtttttggaatgggtgacgtgtgacaacgaaattgcgagaaaccaccccaaacatgagttttggacctaaagtagtggattgggcatgttcgttgcgaaaaaagaagaaatggttccagtggcaaaaaatcgtgctttgtatgcaccccgacacccgtttttggaatgggtgacgtgtgacaacaaaattgcgcgaaaccaccccaaacatgagttttgtacctaaagtagtggattgggcatgttcgttgcgaaaaacaaagaaatggttccggtggcaaaaactcgtgctttgtatgcaccccgacaaccgttttcggaatgggtgacgtgcggcaacgaaattgcgcgaaaccaccccaaacatgagttttggacctaaagtagtggattgggcatgttcgttgcgaaaaacgaagaaatggttccggtggcaaaaactcgtgctttgtatgcacccccacacccgttttcggaatgggtgacgtgcgacaacgaaattgcgcgaaaccaccccaaacatgagttttggacctaaagtagtggattgggcatgttcgttgtgaaaaacgaagaaatggttccggtggcaaaaacttgtgctttgtatgcaccccgataatcgttttcggaatgggtgacatgcagcaacgaaattgcgcgaaaccaccccaaacatgatttttggacctaaagtagtggattgggcatgttcgttgcaaaaaacaaaaaaatggttccggtggcaaaaactcgtgctttgtatgcacccgacacccgttttcggaatgggtgacgtgcgacaacaaaattgcgagaaatcaccccaaacatgagttttggacctaaagtagtggattgggcatgttcgttgcgaaaaacgaagaaatggttccggtggcaaaaactcgtgctttgtatgcaccccgacaaccgttttcggaatgggtgacgtgtgacaacgaaattgcgcgaaaccaccccaaacatgatttttggacctaaagtagtggattgggcatgttcgttgcaaaaaacgaaaaaatggttccggtggcaaaaactcgtgctttgtatgccccccaaccccctttttcggaatgagtgacgtgcggcaacaaatttgcgcgaaaccaccccaaacatgatttttggacctaaagtagtggattcggcttgttctttgcaaaaaacaaaaaaatggttccgggggcaaaaactcgtgctttgtatgccccccaccccctttttcgaaaggggtgacgtgcgacaacaaaattgcgcaaaaccaccccaaacatgatttttggacctaaagtagtggattgggcatgttcgttgcaaaaaacaaaaaaatggttccgggggcaaaaactcgagctttgactgacccccacaccggttttcaaaatgggtgacgtgcgacaacaaaattgggcgaaccccccccaaaaggatttgtctacctaaagtaggggattggccatgcttgttaccaaaacaaaaaaaatggttccggggtgcaa

SEQ ID NO: 760 - DNA, 8713 bp, Zea mays
  source: /note="Zea mays BAC clone full insert sequence contig bacm.pk135.l06.fis16"
aacaaagatgttttagctcccattatcgtgtggttgggcttatttttcctggcataaaaaaaaaaattttttttcgtggaaaaaaatctccttcttttttacccccccccaaacgtttttttcataggtggtgacggggcacgaattagcggggtgacaccccccccaacctgttttttccacatcatgtggggtgggggtgtttctttggataaaaatagaaaaaatttttttgccaaaaaaaagttttcattatccccaccccgaccttttttgtgagagggggcgtgtggcggcaaaaaaattgtaaaaatccccccaaagagttttggccctaaaatttgggttgggggctttttttgaaaaaaaaaaaaaagtttttgtggcaaaaaaaaactcgtgcgttttccgcacccgggacaatttttttcagggtgggtgacgggaggcaaagaaattgggagaacccaccccaaacttttgttttggacaaaaggtggtggatcgggcattttggttgaaaaaaacgaagaatttgttgggggggaaaaaattcgtgtttttatgcacccgacacccgttttcggaatgggtgacgtgcggcaacgaaattgcgcgaaaccaccccaaacatgagtgttgtacctaaagtagtggattgggcatgttcgttgcgaaaaacgaagaaatggttccggtggcaaaaactcgtgctctgtatgcacccgacacccgttttcggaatgggtgacgtgcgacaacgaaattgtgcgaaaccaccccaaacatgagttttggacctaaagtagtggattgggcatgttcgttacgaaaaacgaagaaatggttccggtggcaaaaactcgtgcttttatgcacccgacactggttttcggaatgagtgacgtgcggcaacgaaattgcgcgaaaccaccccaaacatgagttttggacctaaagtagtggattgggcatgttcgttgcgaaaaacgaagaaatggttccggtggcaaaaactcgtgctttgtatgcacccgacacccgttttcggaatgggtgacgtgcgacaacgaaattgcgcgaaaccaccccaaacatgagttttggacctaaagtagtggattgggcatgttcgttgcgaaaaacgaagaaatggttccagtggcaaaaactcgtgctctgtatgcacctgacacccgttttcggaatgggtgacgtgcaacaacgaaattgtgccaaaccacccaaacatgagttttggacctaaagtagtggattgggcatgtttgttgcgaaaaacgaagaaatggtttcggtggcaaaaactcgtgctttgtatgcaccccgataaccgtttttcggaaggggggaggtgtgacaacaaaattgggcaaaacccccccaaactgggttttggtacataagttagaggatggggcatttttgttgcgaaaaaaaaaaaaatggttcggggggcaaaaaatcgtgttttttatgcccccgacacccgtttttggaatgggtgacgtgcggcaacgaaattgcgggaaaccaccccaaacatgagttttggacctaaagtagtggattgggcatgtttgttacgaaaaaagaagaaatggttccggtggcaaaaaatcgtgtttttatgcacccgacactcgttttcggaatgagtgacgtgcggcaacgaaattgcgcgaaaccaccccaaacatgggttttggacctaaagtagtggattgggcatgttcattgcgaaaaacgaagaaatggttccggtggcaaaaatcgtgctttgtatgcacccccgacaaccgttttcagaatgggtgacgtgcggcaacgaaattgcgcgaaaccaccccaaacatgagttttggacctaaagtagtgggttggggcatgttcgttgtgaaaaaaagaaaaaatggttttggtggcaaaaaatagtgttttgtttgcacccccgacaactgtttttgaatgggtgacgtgcggcaacgaaattgcgcgaaaccaccccaaacatgagttttggaccaaaagtatgggattgggcatgtttcgttgcgaaaaaaagaaagaaatggttccggtggcaaaaaactcgtgctttgtatgcacccaacacccgttttcggaatgggtgacgtgcgacaacgaaattgcgagaaatcaccccaaacatgagttttggacctaaagtagtggattgggcatgttcgttgcgaaaaacgaagaaatggttccggtggcaaaaactcgtgctttgtatgcaccccgacacctgttttcggaatgggtgacgtgtgacaacgaaattgcgagaaatcaccccaaacatgagttttggacctaaagtagtggattgggcatgttcgttgcgaaaaacgaagaaatggttccggtggcaaaaactcgtgctttgtatgcaccccgacacccgttttcagaatgggtgacgtgtgacaacgaaattgcgcaaaaccaccccaaacatgagttttgtacctaaagtagtggattgggcatgttcgttgcgaaaaacgaagaaatggttccggtggcaaaaactcgtgctttgtatgcacccgacacctgttttcgaaatgggtgacgtgcgacaacgaaattgtgtgaaaccaccccaaacatgagttttggacctaaagtagtggattgggcatgttcgttacgaaaaatgaagaaatggttccggtggcaaaaactcgtgcttttatgcacctgacactcgttttcggaatgagtgacgtgcggcaacgaaattgcgcgaaacaacccaaaacatgagttttggacctaaagtagtggattgggcatgttcgttacgaaaaacgaagaaatggttccggcggcaaaaactcgtgcttttatgcacctgacactcgttttcagaatgagtgacgtgcggcaaccaaattgcgcgaaaccacccaaaacatgagttttggacctaaagtagtggattgggcatgttcgttgcgaaaaacgaagaaatggttccggtggcaaaaactcgtgctttgtatgcacccgacacccgtttttggaatgggtgacgtgcggcaacgaaattgcgcgaaaccaccccaaacatgagttttggacctaaagtagtggattgggcatgttcgttacgaaaaacgaagaaatggttccggtggcaaaaactcgtgcttttatgcacccgacactcgttttcggaatgagtgacgtgcggcaacgaaattgtgtgaaaccaccccaaacatgggttttggacctaaagtagtggattgggcatgttcgttgcgaaaaacgaagaaatggttccggtggcaaaaatcgtgctttgtatgcaccccgacaaccgttttcagaatgggtgacgtgctgcaacgaaattgcgcgaaaccaccccaaacatgagttttggacctaaagtagtgggttgggcatgttcgttgcgaaaaacgataaatggttccggtggcaaaaactcgtgctttgtatgcacccccgacaaccgtttttagaatgggtgacgtgcggcaacgaaattgcgcgaaaccaccccaaacatgagttttggacctaaagtagtggattgggcatgttcgttgcgaaaaacgaagaaatggttccggtggcaaaaaactcgtgctttgtatgcacccaacacccgttttcggaatgggtgacgtgcgacaacgaaattgcgagaaatcaccccaaacatgagttttggacctaaagtagtggattgggcatgttcgttgcgaaaaacgaagaaatggttccggtggcaaaaactcgtgctttgtatgcaccccgacacctgttttcggaatgggtgacgtgtgacaacgaaattgcgagaaatcgccccaaacatgagttttggacctaaagtagtggattgggcatgttcgttgcgaaaaacgaagaaatggttccggtggcaaaaactcgtgctttgtatgcaccccgacaccaatcgttttcggaatgggtgacgtgcggcaacgaaattgcgcgaaaccaccccaaacatgagttttggacctaaagtagtggattgggcatgttcgttgcgaaaaacgaagaaatggttccggtggcaaaaactcgtgctttgtatgcacccgacacccgttttcggaatgggtgacgtgcgacaacgaaattgcgcgaaaccaccccaaacatgagttttggacctaaagtagtggattgggcatgttcgttgcgaaaaacgaagaaatggttccggtggcaaaaactcgtgctttgtatgcacccgacacccgttttcggaatgggtgatgtgcgacaacgaaattgcgcgaaaccaccccaaacatgagttttggacctaaagtagtggattggacatgttcgttgcgaaaaacgaagaaatggttccggtgccaaaaactcgtgctccgtatgcacccgacacccgttttcggaatgggtgacgtgcgacaacgaaattgtgcgaaaccaccccaaacatgagttttggacctaaagtagtggattgggcatgttcgttacgaaaaacaaagaaatggttccggtggcaaaaactcgtgctttgtatgcacccgatacccgttttcggaatgggtgacgtgcgacaacgaaattgcgcgaaaccgcccgaaacatgagttttggatctaaagtagtggattgggcatgttcgttgcgaaaaacgaagaaatggttccggtggcaaaaactcgtgctttgtatgcacccaacacccgttttcagaatgggtgacgtgcgacaacgaaattgcgcgaaatcacctcaaacatgagttttggacctaaagtagtggattgggcatgttcgttgcgaaaaacgaagaaatggttccggtggcaaaaactcgtgcttttatgcacccgacactcgttttcggaatgagtgacgtgcggcaacgaaattgcgcgaaaccacccaaaacatgagttttgtacctaaagtagtggattgggcatgttcgttgagaaaaacgaagaaatggttccggtggcaaaaacgcgtgctttgtatgcacccccacacccgttttcagaatgggtgacgtgcggcaacgaaattgcgcgaaaccgcccgaaacatgagttttggacctaaagtagtggattgggcatgttagttgcgaaaaacaaagaaatggttccggtggcaaaaactcgtgctttgtatgcaccatgacacccgttttcggaatgggtgacgtgcgacaacgaaattgtgcgaaaccaccccaaacatgagttttggacctaaagtagtggattgggcatgttcgttgcgaaaaacgaaggaatggttcctgatgaggacatcactatcattgatacaaccataccagtgaccacttcaccattcgtagctaatcaaggaccaatgacacgagcccgtgcacgtaaacttaattatcaggtgaactcgttctttgctattgaagctaattcttctttaaatgaggtactaaagccttgcaatgactttattatgctcaggtgtttgggaggtgaaccatcttggattggagaaggcaacaaggcaataaaggctgctgcacccgagaggatttcgtaacagcacaagtacaagtttaaatggggcatatcttccaacttccaaggccgtttaatgcaaataaatacttgttggaaagctcccttcgtctacttgctggtggatcaagaattaatgggagactacacccgaggcgtccagaaactgccgagggaacttcatgactccaccagaattccttcttcctatttctctatttaagcaactagcagccaccaaagaacttgggttttgtttgatgtaagtttagcctttgctacttccttgtaaacgcgtgtgtcggctagaccacccgaatacttgaaacgggaccccaactttatcagatccgtgcgtgtttgcttgttatcttgttcttgcttgttctcgattgcttgcaggttcaaggctgttcttggcacggcaagagcagcaacaacaggagccggtgtaactatcgctaaggcgcaacacccttgtggttgttgtagtcggatagcacaacgtcgacctccaccccaaatcgtagttatcaggagacggtgtacctgtcgctcaaggcgccacaccatcttggttgtggtagtcgggcagccaacgtcgttctccaacaagttttccacctccatcatctctcatcgaaagatcgggcacccttctacccgttgggttcatcaagtggtatcaaatttcaggttgctcggtgagagatctccatcttccttattttatttacctacagtccacttttgccaaagatatatttagagcagaaaatcacctaaaaacattttgagcctttgctttactacttagttttcgacttgttgaattcacggttgctgcatttgtgtcgagttgctggtccaaagtttcttgctgctagagtttcgagttcgtgccaccttgtttagatcaccatttttagttctctagctgttctctagctgtagttcaaaaaaacaaggaaaaggaaaaggcaagtgcacaaaaaaagtcacgctgataaaaaaaagcacgtacaaaaaagagaaaaaaaatcgcagtaagaatattggtagataaaattccatgtgcaacaaaacaaagacagtttgtgtgccaccgtttgacaattttctaagtcagcttgctgttttgagtatttggtgatatcatttgtgtaacggctcgcgtctctattacggtttggactaggaccagcacaacaccattgtggaacgattattcaacttgttgtggctaatgtggtactagctattccttggaactattgttttagcagccacctataaatccacaaatttttctacaacaccaccaggttgtgctagcagccactgttgttgttcttgctgtttgccagcgccacttgctttgcgtggtgagaacttgtaagagcttgatttcttgctagtgaggtagtgtttatccatccacatcatagcaactactaggctgcattacttgtttttgtatctcttttgcactaaccatggcagaggatgcaaatgcgcgacctccacattctccacgaacagtgggcatcattcaacatttcgaacgtcaagtatggttgcacacagatgccctcaatgaagatgttcaagtcaccaatgagcgcattggtcaattagaaacagcacaaattgttaccgacaacacattgaccactttggaacgaacagttgctgctgctaacacctctcttgcagcaattattgagcgcttagataggatggaccaagttgggcgtgaaggtaggcaacaaggtgatgatgatggctatggttccattgctggtaccgcaagagatgatgctacggagtattcagcagacaccgagcgtgatgaccgatctattaggcaccgacgacaccaacgacgtgatcgccatggcttgggtggtcgacctccacgacgtgaggtacgtgaaaatgatgattctctaggaagaattaaattctccataccatcgtttgatggaaaatatgatcctgatgcatatctaacatgggaattgtcggtagatcaaaaatttgcatgctatgatttttctgatgataaaaaggttagagctgctacgagtgaattcactgattttgcttctatttggtggcatgagtaccaaactacacatccagctaccataccacaaacttggaatgctttaaaaagaatcatgcgtagtcgttttgttccttcctatcatgctcgtgatttattacataaattacaacagcttagacaaggcaacaaatctgttgaagagtattatcaacaattacaaataggcatgttgaggtgtggtctcgtagaaaatgaagaagctgcaatggctaggttcatgggtggtttgacaagagaaattcaggatatattagcttacaaggaatacactaatgttactcgcttatttcatcttgcttgtaaggctgaaagagaagtccagggacgatgcttgagaactaacacttatgcaggtcgcaatacatcttggcagccccgcactagtgctgctagctctaaccatgtgtttcagggagatgcttccaatagatcatccacaacaccatcgaaatcagcaccttctcgtgctattgagacagggaaaggatcctcccaagctgtagccaaatcttcttctattgcttccacgggaagaacaaaggacatccaatgcctccaatgcaaaggatttgggcacattcgaagggactgcccaagcaagcgtgtactaattataagagaaaatggtgagtactcatcagccagcgatttagataatgatacatatgccatgcttgctgcccaagatgctgaaaaggagcatgatgatgaagagcatattggggctgaacatgctgaacactatgagagcctcgttgtaagacgtgtcttgagtgcccaaattattaaagctgaacaaaaccagcgacacaatttgttccaaactaaatgtgtagttttggaacgatcttgtcgtattataattgatggaggaagctgcaacaacttagcaagcaccaccatggtagagaagcttgggctgaaaacgcttccacatccacacccctactacatccaatggttcaacgacagtggt

SEQ ID NO: 761 - DNA, 10900 bp, Zea mays
  source: /note="Zea mays BAC clone full insert sequence bacm.pk135.l06.fis17"
gacagcccccttttcaaaatttttgagtggggcaacaagattcagcgaaaacgcccgaaaccacccttttgaccaatttgggcggaaagggcaggtttggggcgaaaaaggaagaaatggttccggggggttaaagtggcaaaattttgtgcttttatacacttctttaccagtttttacgaggggcgacgtgagtcaacgaaatcgcgtcaaaccacctcttacgacagtttttggccgaaagtggttgtttgggccgaaaaacggagaaaaagttcgaaagggttaaagtggcaaaaaatcgtgccccctatccccccccgacacccgttttgggaatgggtgacgtgcgacaacgaaattgcccgaaaccacccaaaacatgagttttggacctaaagtagtggattgggtatgttcgttacgaaaaacgaaataatggttccggtggcaaaaactcgtgcttttatgcaccagacaattgttttaggaatgagtgacgtgcgacaaggaaattgcgcgaaaccacccaaaacatgagttttggacgtaaagtagtggattgggcatgttcgttacgaaaaacgaagaaatggttccggtggcaaaaactcgtgcttttatgcacctgacactcgttttcggaatgagtgacgtgcggcaacgaaattgcgcgaaaccacccaaaacatgagttttggacctaaagtagtggattgggcatgttcgttgcgaaaaaagaaaaaaaggaaccggttccaaaggcaaaaacttgtgctttgtatgcccccgacacccgttttcggaatgggtgacgtgcgacaacgaaattgtgcgaaaccaccccaaacatgagttttggacctaaagtagtggattgggcatgttcgttgcaaaaaacgaagaaatggttacggtggcaaaaactcgtgctttgtatgcacccccacacccgttttcggaatgggtgacgtgcgacaacgaaattgcgcgaaaccaccccaaacatgagttttggacctaaagtagtggattgggcatgttcgttgcgaaaaacaaagaaatggttccggtggcaaaaactcgtgctttgtatgcaccccgacaaccgttttcagaatgggtgacgtgcggcaacgaaattgcgtgaaaccaccccaaacatgagttttggacctaaagtagtggattgggcatgttcattgcgaaaaataaagaaatggttccggtggcaaaaactcgtgctttgtatgcacccgacacccgttttcggaatgggtgacgtgcgacaacgaaatcgcgagaaatcaccccaaacatgagttttggacctaaagtagtggattgggcatgttcgttacgaaaaacgaagaaatggttccggtggcaaaaactcgtgctttgtatgaccccgacacccgttttcggaatgggtgacgtgcgacaacgaaattgcgcgaaaccaccccaaacatgagttttgtacctaaagtagtggattgggcatgttcgttgcgaaaaacgaagaaatggttccggtggcaaaaactcgtgcttttatgcacccgacactcgttttcggaatgagtgacgtgcgacaacgaaattgcgcgaaaccacccgaaacatgagttttgtacctaaagtagtggattgggcatgttcgttgcgaaaaacttagaaatagttccggtggcaaaaactcgtgctttgtatgcaccccgacaaccgttttcagaatgggtgacgtgcggcaacgaaattgcgtgaaaccaccccaaacatgagttttggacctaaagtagtggattgggcatgttcattgcgaaaaataaagaaatggttccggtggcaaaaactcgtgctttgtatgcacccgacacccgttttcggaatgggtgacgtgcgacaacgaaattgcgagaaaccaccctaaacatgagttttggacctaaagtagtggattgggcatgttcgttgcgaaaaacgaagaaatggttccggtggcaaaaacttgtgctttgtatgcaccccgataatcgttttcggaatcggtgacgtgcggcaacgaaattgcgcgaaaccaacacaaacatgagttttggacctaaagtagtggattgggcatgttcgttgcgaaaaacgaagaaatggttccggtggcaaaaactcgtgctttgtatgcacccccacacccgttttcggaatgggtgacgtgcgacaacgaaattgcgtgaaaccaccccaaacatgagttttggacctaaagtagtggattaagcatgttcgttgcgaaaaacgaagaaatggttccggtggcaaaaactcgtgctttgtatgcacccgacacccgttttcggaatgggtgacgtgcgacaacgaaattgtgcgaaaccacaccaaacatgagttttggacctaaagtagtggattgggcatgttcgttgcgaaaaacgaagaaatggtttcggtggcaaaaatgatgtagctgaggtgcccgatctttcggcgagtagagataattccgatttggcggaagatgacccttgcgatccgactacgacgagcaagcccgaggcgccaatgcaatcgctgaaccaactccctgtggttaccgaccttgctgatgcgagatcggcctgatcacgaagatcgtttcctgtgcgtaatcgaagaacgaacaagaaaaagatgcgagcaatctaatctattactcgagggtggagttctgaatacacgaagacagcgcagatttgcgcgtgttcgagagtagctaaggctaacgtaaaacaaaactcagaaaataaaggaggcgcagctcctgaataaatagagagggggcgcagcccctaggggcggccaaccctaggtcgtccattatgggccgcaattgggctggtcgtctatccttccgggccttcgttctttaacaacatgatgtagttcaattctcttgcacgagcccgagtcactggcccaggtggaaggggtggcgcctgggctggagaaggtgctgctggtgtagatgtgctcgtgttggtgttgatgtccgcatcatcctccccttcttgaactgaagtcgtcctcgacggcaactcctcatcttctctcgcatacggtttcaaatctgcaacattaaaactagtggaaacaccaaactccgcaggcaggtcaaggatataagcattatcattaatcttggttagtaccttaaaaggaccagcagcacgaggcatcaatttagaacggcgcaaagtaggaaaacgatcctttctcaaatgcaaccaaaccatatcaccaggttcaaaagtaacatgttttcttcctttactaccagcaacatgattttttgcattagtagcagcaatgttctgtttcgtttgttcatgtatggtaatcatttgttcaatatgtgcagaagcatctacatgtggggcgttcgcagcattaagtgaaatcaaatcaataggtgccctaggaatgtaaccataaactatctggaaagggcacatctttgtagaagaatgcgtggcatgattgtaagcaaattcaacatgaggcaagcaatcctcccaacgtctcaaattcttgtctaaaacagccctaagcatggtagataaagttctatttactacctcagtttgtccatcagtctgagggtgacaagtagtgctaaacaacaatttagttcccaatttattccaaagagatctccaaaaatggcttagaaacttagcatcgcgatcagagactatggtttttggaataccatgtaaacgaataatttctctaaagaacaattcagcaacaatgctagcatcatcagttttatgacaaggtataaagtgagccattttagagaatctatcaacaaccacaaaaatactatccctccccttcttagttctaggcaagcccaaaacaaagtccatagagatatcaagccaaggagaagaagggacaggcaaaggcatatacaaaccatggttgttcaaccgtgacttagctttctgacaagtagtgcagcgtgcaacaaggcgctcaacatcagcacgcatctgaggccaaaagaagtgggcagccaacacctcatgcgttttgtagacgccaaaatgccccatgagaccgcctccatgtgcctcctgtaacaacaaaagacgaaccgaactagctgaaatacacagcttgttagcgcgaaacaagaacccatcttgtatgtgaaatttgccccatggtatcccattaatacaatggccgaaagcatctttaaaatcagcatcgtcaacatattgatccttcacagtgtccaaaccaaagattttaaaatctaattgtgacagcatggtatagcgacgagacaaagcatcagcaataacattgtccttcccgttcttgtgtttaataatgtaaggaaaggactcaatgaattcgacccatttagcatgacgacggttcagatttgtttgggtacgaatatgttttaaagcctcatgatcagaatgaattatgaactcacgatgccaaagatagtgctgccatgtatgcaaagtgcgcactaaagcgtaaagctccttatcataagtagaatatttcagactagcaccgcttaatttttcactaaaataagcaactggttttccttcttgtaacaaaacagcacctagcccaataccgctagcatcacattcaagctcaaaaactttattaaaatcaggcaattgcaagaggggagcttgggttaacttatctttcaaagtgctgaacgctacctcctgcgaatcactccaagcaaacggcacatctttctttgtaagctcatgtagaggcgctgcaatggagctaaaatcacgaacaaatctgcggtagaaaccggcaagtccaagaaagctcatttgtgtgaccgtcgtcggtgtaggccactcccgaatggcagcaatcttgctgctatccacctcaatgccctgtggagtaaccacataaccaagaaacgagacacgttgcgtgcaaaatgtgcacttttccatgttaccaaacaagcgagcagcacgcaaagcatcaaaaacagcacgcaaatgttctaaatgctcctctatagacttgctataaataaggatatcatcgaaataaacaacaacaaacaaacctatgaaggcccgtagaacttcgttcattaaacgcgtggaataggatatcgataacgaactgtgatgttattaatagcacgacaatctacgcacatacgccatgacccatctttctttggaacgagtaaaacaggaaccgagcaagggctaagagactcacgaatgtaacccttatcaagcagcgtctgcacctggcgctggatctccttcgtctcctctggatttgtacggtacggggcgcggttcggaagagaagcgccggggatgagatcgatctgatgctcaatgccacagaggggaggaagacctggtggtaagtccgtaggataaacatcagcatactcctgcaaaaggttaacaacagcagggggtatatccaaagacggtgcatcatcaagcggaacaagcatgcgcgagcatacaagtgcataacagggcatatgagcttcatggagatcatcaaaatcagcacgtgtagcaagtaaaacaggagagtgcaacttgatttcagatttaataggtgcggctgatgtcgatttgacttgttgtgcagttttagcagccctagtaagatcatctttcaaaatttggtcaggggtcattggatgtataattattttctggcctttaaacatgaaagaataatgatttgaacgaccatgatgtaaactatcagtatcatattgccaaggtcgacctaataacaaagagcatgcttccataggaataacatcgcaatcagcataatcagaataagaacccagcgaaaaggggacacgtaccgaacgtgttacctttattttaccaccatcattaagccattgaatgtgatacggatgtggatgtgtgcgagtgggcaaggataatttctctaccaacgctgtacttgccaaattgttgcagctgccactatcgatgatgatgcgaatcgaccgttcgtgcacgacgcccttggtatggaatagagtgtgtcgctgatttttttcggcctgggcaacctgtgtgctgagaacacgctgcacaacctgtctcttatacacatctcaaccctgaagctcttgttggctagtgcgtagtcgttggcaagctctagaggatccccacggcttcccgtgggacgtgtagcagcacgcaagcacttctcaatgcagcaggcacaggatgcccgcacgaacgatgggacacgggcgccgggagtcggctgcacggcagcgggggtcctccaagcagtcacgggtccaagacaactcatgcgccagcgtagccgctacggtcgagccatccaaagcatccctccgcgctgggcgcggcgggtctacttgcgaggacggcgaccgaaggtccaccgagcacgggagaaatggaaaacgcatcgagcaacgggccatcccacagtgcagccactcgtccagggcgtctggccggcgctagccagccatagccggtcgtggctgcgtcacggccgaaccatggccggccaggcagccaacagcgccagctggagctgggcgcggtagggtgctgaccggccacggctaggccgcgagggggtgcggggctcggccgaggagacctggaggagacgctggaaacgctatggtttcagcagcgttccgcccgggtttcggctgcacgagttccctaccccctactatacctgaggggcataccccctcccaggacttcggggagttcagccttcagaaaaccagggtattttccctggacgccacgaaacccatctaagatggccggacacaacgtttttgctcagaatcaggggtttcgctagcgtgacccgttttccctcacgggtcgacccgaacttcgatgtctcacgcggggggaccacgggagggtcccgtgcccttccacgtgcccgtttttgcggccgtggccgaaaatccgtttttggcccgtgcgccatggcgaacccctcgttttcagcccaaacgcaaggccgaacagccctgccacccgtggcagcgcgcctccgagccgttttccctccgttccaccgtgcccttcactcaagacatgcactttaggttcggtgtctttccacatgcttggacttagcttattttcggggtcgtgcccgagcctcagttttcggcccgtgcgccatggcgaacccctcgttttcagcccaaacgcaaggccgaacagccctgccgcctgtggcagcgcgcctcctcccgttttccctccgttccaccttgcccttcactcaagacatgcactttaggttcggtgtctttccacatgcttggacttagcccgtttttgcggccgtggccgaacctcagttatcagcccgcgcgccatggcgaacacctcgttttcagcccaaacgcaaggccgaacagccctgccgcccgtggcagcgcgcctcctcccgttttccctccgttccaccttgcccttcactcaagacatgcactttaggttcggtgtctttccacacgcttggacttagcccgttttcgcggccgtggccgaacctcagttttcagcccgcgcgccatggcgaacacctcgttttcagcccaaacgcaaggccgaacagccctgccgcccgtggcagcgcgcctcctcccgttttccctccgttccaccttgcccttcactcaagacatgcactttaggttcggtgtctttccacacgcttggacttagcccgttttcgcggccgtggccgaacctcagttttcagcccgcgcgccatggcgaacacctcgttttcagcccaaacgcaaggccgaacagccctgccgcccgtggcagcgcgcctcctcccgttttccctccgttccaccttgcccttcactcaagacatgcactttaggttcggtgtctttccacatgcttggacttagcttattttcggggtcgtgcccgagcctcagttttcggcccgcgcgccatggcgaacacctcgttttcagcccaaacgcaaggccgaacagccctgccgcccgtggcagcgcgcctcctcccgttttccctccgttccaccgtgcccttcactcaagacatgcactttaggttcggtgtctttccacatgcttggacttagcttattttcggggtcgtgccctagcctcagttttcggcccgtgcgccatggcgaacccctcgttttcagcccaaacgcaaggccgaacagccctgccgcccgtcgccacgcgcctgctcccgttttccctccgttccaccttgcccttcacttaagacatgcactttaggttcggtgtctttccacaagcttggacttagctaattttggaggtcgtgcccgagcctccgatttcggcccgtgcgccatggcgaacccctcgttttcagcccatacgcaaggccgaacagccctaccgcccgttgccgcgtgcctccgtgtcgttttccctccgttccaccgtgcccttcaccaaagacatccactttaggttcggtgtgtttccacatgcttggacttagtttattttcgggttcgtgccacagccaccatttccggcccgcgcgccatggcgaaccacctgtttttagcccagacgcattgccgaacagccctgccgcccgtcgccgcgggcctccgtgtcgttttccctccgttccatcttgcccttcacccaagacatacacattagcttcggtgtctttccacacgcttggacttagcttatttccgaggccgtgccccagccgctgttttcggcccacgcgccatggcgaaaccctcgttttcagcccaaacgcaaggccgaacagccatgccgcccgtcgccgcgcgcctccgtgtcgttttccctccgttccaccgtgcccttcacccaagacatacacattagcttcggtgtctttccacacgcttggacttagcttatttccgaggccgtgccccagccgccgttttcggcccgcgcgccatggcgaaaccctcgttttcagcccaaacgcaaggccgaacagccatgccgcccgtcgccgcgcacctcctcccgttttccctccgttccaccttgaccttcactccagacatgcactttaggttcggtgtctttccaaacgctgggacttagcccgttttcggaccgtggccgaaccgttgttttcggaccacgcgccatggcgaacacctcgttttcagcccaaacacaaggacgaacatccctgccgcccgtcgccgtgcgcctccgtgccggagcctcagttcgtcgcgtgcctccgtgtcgttttccctccgttccactgtgcccttcaccaaagacatacactttaggttccgtgtctttccacacgcttggacttagcttattttcgagttcgtgcctgagcctcagttttcggcccgtgcgccatggcgaacacctcgttttcagccaggacgcaaggccgaacagccatgccgcccgtcgtcgcgtgcctccgtgtcgttttccctccgttccaccgtgcccttcactcaagacatacaaacaccttagcttcggtgtctttccattccacacgcttggacttagcttattttcgaggtcatgcccgagcctcagttttcggcccgtgcgccatggcgaacccctcgttttcagcccagacgcaaggccgaacagccctgccgcccgtcgccgcgcgcctccgtgccgttttccctctgttcctccgtgcccttcacccaagacatacatattagcttcggtgcctttccacacgcttggacttagcttattttcggggtcgtgcctgaacctcatttttcggcccgtgcgccatggcgaacccatcgttttcggcccaaacgcaaggccgaacagccatgccgcccgtcgtcgcgcgcctccgtgtcgttttccctccgttccaccgtgcccttcactcaagacatacatacaccttagcttcggtgtctttccattccacacgcttggacttagcctattttcgaggtcgtgccccggtcgccgtttgcggcccgcgcgccatggcgaacccctcgttttcagcctagacgcgtggccgaacagccctgccgcccatcgccaacgttccatcgtgcccttcacccaaggcatacgtaggagcttcggtttctttccacacgctgggacttagcttttcttgtggtcgtgcacgaactcacggcggttttcggcctcttgccacgctgcgccttggacgtttccgttcggaagatcggtgcccctctcccgtgggttcgaaacctagtcgctgggcgctgtgtagagtggggggagggacgaatccgtgcgacgcggggctggatctcagtggatcatggcagcaaggccactctgccacttacaatgccccgtcgcgttttaagtcgtctgcaaaggattcagcacgccgcccgttgggaagggagcttcgaggcggcccgccgcggcgcgtcgaccgggcgggctgagccaatggcacgggcccttggggcgcgaacgccctaacgtgggtcggggcgggcggcgagcagaggcgccggttgctagcttggattctgacttagaggcgttcagtcataatccggcacacggtagcttcgcgccactggcttttcaaccaagcgcgatgaccaattgtgtgaatcaacggttcctctcgtggagcttcggtccgggtcacctttgtccaccaagatggaactgcggccggccgctcattaattaagtcaggcgcgcctctagttgaagacacgttcatgtcttcatcgtaagaagacactcagtagtcttcggcca

SEQ ID NO: 762 - DNA, 17354 bp, Zea mays
  source: /note="Zea mays BAC clone full insert sequence contig bacm.pk135.l06.fis18"
tcgcaacgaacatgctcaatccactactttaggtccaaaactcatgtttggggtggtttcgcgcaatttcgttgccgcacgtcacccattctgaaaacggttgtcggggtgcatacaaagcacgagtttttgccaccggaaccatttcttcgtttttcgcaacgaacatgcccaatccactactttaggtacaacactcatgtttggggtggtttcgcgcaatttcgttgccgcacgtcacccattccgaaaacgggtgtcgggtgcataaaagcacgtgtttttgccaccagaactatttcttcgtttttcgcaacgaacatgcccaatccactactttaggtccaaaactcatgtttggggtggtttcgcgcaatttcgttcccgcacgtcacccattctgaaaacggttgtcgggggtgcatacaaagcacgagtttttgccaccggaaccatttcttcgtttttcgcaacgaacatgcccaatccactactttaggtccaaaactcatgtttgggctgctttcgcgcaatttcgttgccgcacgtcacccattccgaaaacggttgtcggggtgctttggccctgctaatgaagttaagatctctggcacgggcccgagtgattggcccagctaatgaagttaagatctctggcacgggcccgagtgattggcccagctaatgaaggaagtggcgcttgatgtggaggtgctgctggtgtagtcgtactcatagtgatgtcctcatcagtgcatacaaagcacgagtttttgccaccgaaaacatttctttgtttttcgcaacgaacatgcccaatccactactttaggtccaaaactcatgtttcgggtggtttcgcgcaatttcgttgccgcacgtcacccattctaaaaacgggtgtgggggtgcatacaaagcacgagtttttgccaccggaacagtttcttcgtttttcgcaacgaacatgcccaatccactactttagatccaaaactcatgtttggggtgatttctcgcaatttcgttgtcgcaagtcacccattccgaaaacgggtgtcgggtgcatacaaagcacaagttttttgccaccggaaccatttcttcgtttttcgtaacgaacatgcccaaaccactactttaggtctaaaactcatgtttggggtggtttcacgcaatttcgttgccgcacgtcacccattctaaaaacggttgtcggggtgcatacaaagcacgagtttttgccaccggaaccatttcttcgtttttcgcaacgaacatgcccaacccactactttaggtccaaaactcatgtttggggtggtttcgcgcaatttcgttgccgcacgtcacccattcggaaaacggttgtcggggtgcatacaaagcacgatttttgccaccggaaccatttcttcgtttttcgcaacgaacatgcccaatccactgctttaggtacaaaactcatgtttggggtggttcgcgcaatttcgttgccgcacgtcactcattccgaaaacgagtgtcgggtgcataaaagcacgagtttttgccaccggaaccattttttcgttttttcgtaacgaacatgcccaatccactactttaggtccaaaactcatgtttggggtggtttcgcgcaatttcgttgccgcacgtcacccattccgaaaacgggtgtcgggtgcatacaaagcacgagtttttgccaccggaaccatttcttcgtttttcgcaaagaacatgcccaatccactactttagatccaaaactcatgtttgaggtggtttcgcgcaatttcgttgtcgcacgtgacccattctgaaaacgggtatcggggtgcataaaagcacgagtttttgccaccggaaccatttctttgtttttcgtaacgagcatgcccaatccactactttaggtagaaaactcatgtttggggtggtttcgcacaatttcgttgtcgcacgtcactcatttcgaaaacgggtgtcgggttcatacaaagcacgagtttttgccaccggaaccatttcttcgtttttcgcaacgaacatgcccaatccactactttagatccaaaactcatgtttggggtggtttcgcgcaatttcgttgtcgcacgtcacccattccgaaaacgggtgtcgggtgcatacaaagcacgagtttttgccaccggaaccatttcttcgtttttcgcaacgaacaagccgaatccactactttaggtccaaaactcatgtttggggtggtttcgcgcaatttcgttgccgcacgtcactcattccgaaaacggttgtcggggtgcatacaaagcacgagtttttgccaccggaaccatttcttcgtttttcgcaacgaacatgcccaatccactactttaggtccaaaactcatgtttggggtggtttcgcgcaatttcgttgtcacacgtcacccattccgaaaacggttgtcggggtgcatacaaagcacgagtttttgccaccggaaccatttcttcgtttttcgcaacgaacatgcccaatccactactttaggtccaaaactcatgtttggggtgatttctcgcaattttgttgtcgcacgtcacccattccgaaaacgggtgtcgggtgcatacagagcacgagtttttgccaccggaaccattcttcgtttttgcaacgaacatgcccaatccactactttaggtccaaaactcatgtttggggtggtttctcgcaatttcggtgtcgcacgtcacccattccgaaaacgggtgtcgggtgcatacaaagcacaagtttttgccaccggaaacatttttttgtttttcgcaacgaacatgcccaatccactactttaggtccaaaactcatgtttggggtggtttcgcgcaaaatcgttgccgcacgtcacccattccgaaaacggttgtcgagggtgcatacaaagcacgagtttttgtcaccggaaccatttcttcgtttttcacaacgaacatgcccaatccactactttaggtacaaaactcatgtttggggtggtttcgcgcaatttcgttgtcacatgtcacccattccgaaaacgggtgtcggggtgcatacaaagcacgagtttttgccaccggaaccatttcttcgttttttgcaacgaacatgcccaatccactactttaggtccaaaactcatgtttgggctggtttcgcgcaatttcgttgtcgcacgtcacccattccgaaaacgggtgtcgggtgcatacaaagcacgagttttttccaccggaaccatttcttcgtttttcgcaacgaacatgcgcaatccactactttaggtccaaaactcatgtttggggtggtttcgcgcaatttcgttgccgcacgtcacccattccgaaaacggttgtcgggggtgcatacaaagcacgagtttttgccaccggaaccatttcttcgttttttcacaacgaacatgcccaatccactactttaggtccaaaactcatgtttggggtggtttcgcgcaatttcgttgtcacacgtcacccattccgaaaacgggtgtagggggtgcatacaaagcacgagtttttgccaccggaaccatttcttcgtttttcgcaacgaacatgcccaatccactactttaggtccaaaacacatgtttgaggtggtttctcgcaatttcgttgtcgcacgtcacccattccgaaaacgggtgtcgggtgcatacaaagcacgagtttttgccaccggaaccatttcttcgtttttcgcaacgaacatgctcaatccactactttaggtccaaaactcatgtttggggtggtttcgcgcaatttcgttgccgcacgtcacccattctgaaaacggttgtcggggtgcatacaaagcacgagtttttgccaccggaaccatttcttcgtttttcgcaacgaacatgcccaatccactactttaggtacaacactcatgtttggggtggtttcgcgcaatttcgttgccgcacgtcacccattccgaaaacgggtgtcgggtgcataaaagcacgagtttttgccaccagaactatttcttcgtttttcgcaacgaacatgcccaatccactactttaggtccaaaactcatgtttggggtggtttcgcgcaatttcgttcccgcacgtcacccattctgaaaacggttgtcgggggtgcatataaagcacgagtttttgccaccggaaccatttcttcgtttttcgcaacgaacatgcccaatccactactttaggtccaaaactcatgtttgggctgctttcgcgcaatttcgttgccgcacgtcacccattccgaaaacggttgtcggggtgcatacaaagcaagagtttttgccaccagaaccatttcttcgtttttcacaacgaacatgcccaatccactactttaggtacaaaactcatgtttggggtggtttcgcgcaatttcgttgtcacacgtcacccattccgaaaacggttgtcggggtgcatacaaagcacgagtttttgccaccggaaccatttcttcgtttttcgcaacgaacatgcccaatccactactttaggtccaaaactcatgtttggggtgatttctcgcaatttcgttgtcgcacgtcacccattccaaaaacgggtgtcgggtgcaaacaaagcacgactttttgccaccggaaccatttcttcgtttttgcaacgaacatgcccaatccactactttaggtccaaaactcatgtttggggtggtttctcgcaatttcggtgtcgcacgtcacccattccgaaaacgggtgtcgggtgcatacaaagcacgagtttttgccaccggaaccatttcttcgtttttcgcaacgaacatgcccaatccactactttaggtccaaaactcatgtttgggatggtttcgcgcaaaatcgttgccgcacgtcacccattccgaaaacggttgtcgagggtgcatacaaagcacgagtttttgccaccggaaccatttcttcgtttttcgcaacgaacatgcccaatccactactttaggtacaaaactcatgtttggggtggtttcgcgcaatttcgttgtcacacgtcacccattccgaaaacgggtgtcggggtgcatacaaagcacgagtttttgccaccggaaccatttcttcgtttttcgcaacgaacatgcccaatccactaatttaggtccaaaactcatgtttgggctggtttcgcgcaatttcgttgtcgcacgtcacccattccgaaaacgggtgtcgggtgcatacaaagcacgagtttttgccaccggaaccatttcttcgtttttcgcaacgaacatgcccaatccactactttaggtccaaaactcatgtgtggggtggtttcgctcaatttcgttgccgcacgtcacccattccaaaaacgattatcggggtgcatacaaagcacaagtttttgccaccggaaccatttcttcgtttttcgcaacgaacatgcccaatccactactttaggtccaaaactcatgtttagggtggtttctcgcaatttcgttgtcgcacgtcacccattccgaaaacgggtgtcgggtgcatacaaagcacgagtttttgccaccggaaccatttcttcgtttttcgcgacgaacatgcccaatccactactttaggtccaaaactcatgtttggggtggtttcgcgcaatttcgttgccgcacgtcacccattccgaaaacggttgtcgggggtgcataaaaagcacgagtttttgccaccggaaccatttcttcgttttttcgcaacgaacatgcccaatccactacttcaggtacaaaactcatgtttggggttgtttcgcgcaatttcgttgtcacacgtcacccattccgaaaacgggtgtcgggtgcatacaaagcacgagtttttgccaccggaaccatttcttcgtttttcgcaacgaacatgcccaatccactactttaggtacaacactcatgtttggggtggtttcgcgcgatttcgttgccgcacgtcacccattctgaaaacggttgtcgggggtgcatacaaagcacgagtttttgccaccggaaccatttcttcgtttttcgcaacgaacatgcccaatccactactttaggtacaaaactcatgtttggggtggtttcgcgcaatttcgttgccgcacgtcactcattccgaaaacgagtgtcgggtgcataaaagcacgagtttttgccaccggaaccatttcttcgtttttcgtaacgaacatgcccaatccactactttaggtccaaaactcatgtttggggtggtttcgcacaatttcgttgtcacacgtcacccattcccaaaacgggtgtcgggtgcatacaaagcacgagtttttgccaccggaaccatttcttcgtttttcgcaacgaacatgcccaatccactactttaggtccaaaactcatgtttggggtggtttcgcgcaatttcgttgccgcacgtcacccattccgaaaacggttgtcggggcgcatacaaagcacgagtttttgccaccggaaccatttcttcgtttttcgcaacgaacatgcccaatccactaccttaggtccaaaactcatgtttggggtggtttcgcgcaatttcgttgtcacacgtcacccattctgaaaacgggtgtcgggtgcatacgaagcacgagtttttgccaccggaaccatttcttcgttttttgcaacgaacatgcccaatccactactttaggtccaaaactcatgtttggggtggtttctctcaatttcgttgtcgcacgtcacccattccaaaaacgggtgtcgggtgcatacaaagcacgagtttttgccaccggaaccatttcttcgtttttcgcaacgaacatgcccaatccactactttaggtccaaaactcatgtttggggtggtttcacgcaaattcgttgccgcacgtcacccattccgaaaacggttgtcgagggtgcatacaaagcacgagtttttgccaccggaaccatttcttcgtttttcgcaacaaacatgcccaatccactactttaggtccaaaactcatgtttggggtggtttcgcgcaatttcgttgccgcacgtcacccattctgaaaacggttgtcggggtgcatacaaagcacgagtttttgccaccggaaccatttcttcgtttttcgcaatgaacatgcccaatccactactttaggtacaacactcttgtttggggtggtttcgagcaatttcgttgccgcacgtcacccattccgaaaacgggtgtcgggtgcataaaagcacgagtttttgccaccagaactatttcttcgtttttcgcaacgaacatgcccaatccactactttaggtccaaaactcatgtttggggtggtttcgtgcaatttcgttcccgcacgtcacccattctgaaaacggttgtcgggggtgcatacaaagcacgagtttttgccaccggaaccatttctacgtttttcgcaacgaacatgcccaatccactactttaggtccaaaactcatgtttggggtggtttctcgcaatttcgttgtcgcacgttgatgaggacatcactatgagtacgactacaccagcagcacctcaacatcaagcgccacttccttcattagctgggccaatcactcgggcccgtgccagagatcttaacttcgtcattgtactaaagaatgagggcccagaagaatagacgaccagccccactgcagcccatagtggacgacctagggttggccgcccctaggggctgcgccccctctctatttaaacaggagttgcgcctcctttgttctccgagttttgttttacgttagctttagctactctcaaacacgcgcaaatctgcgctgtcttcgtgtattcagaactccaccctcgagtaatagattagattgctcgcatctttttcttgttcgttcttcgattgcgcacaggaaacgatcttcatgatcaggccgatctcgcatcagcaaggtcggtaaccagagggagttggttcagcgattgcattggcgcctcgggcttgctcgtcgtagtcggatcgcaagggtcatcttccgccaaatcggaattatctctactcgccgaaagatcgggcacctcagctacatcaattggtatcagatttctaggttgatcggtgagtttatcgagtgtttttttctcctacagtccacaaaaccacataaaaattcaggaaaataaagaaaaaaattcgtcaaagttctcgcacgcttttcatagaacttcctgattttctatagaccacatctgatatctgttttaggtgaaacttcgtgtagctcctatcttgttgcttcttgtgctgagaaaaatatcaaaaaaataatacaaaaaaaagaaaaacaaaatcacatgtgattcctactagtgcctttttggcatcactagtacaatatttacggtactgccattttgctagttccatccgtcccttgcacctgtggccagcaatatagtttcgtgttttgcactataattcaactttgcattattgttttgatcgtgctaatccttgacttgagtgcagcctacccagaactccacatatttctacgacgagcaggtttctgtatctccacgcaatcgctcatccaatctttcaccggttccacctgttgattgcagttcaccactgtggcttggtaagaacgtataagaacttgataacagcattccatcgagcgagcaagttgtcaccaccattcccctgttgtcgtcggtttttctccttttggtgttttggtgtttgcgctaactatggcaggagcacacgacatggtggatgcccagttgcaggaagtaaggggacaagttgatggacttgctgctgacattaggacgatgcatgaacggcttgattcaacgatcacttcgacgaccgagcgtttcaaccaacttgaccttgctcaaacggcgactcgcaccacactcgacaccatcctggcacgccttgatgcattgaccacaaagctggagcaagaatacggcggtgacactgagcaggacgatggagatcgccgtggtcgtgcacgtcgtgtggttcgtcatccccctaatgacttattttctaagattaaatttaaaattccatcttttaatggtaaatatgatcctgctgcatatcttgattgggaattagaggtagaacagaaattttcatgccatgatattcctgctaatagccaagtgaaggctgccattagtgaatttactgattttgctttaatttggtggcgtgagtataaacaaaaacttcccattaacagtgtcattacttggacccaattaaaaactgccatgcgccacagatttgttccttcctattatgctcgtgatttgcttaacaaaatgcagcgttttcaacaaggttcacaatctgttgaggaatattaccaggagttacaaaagggtatgcttcgttgtggtttggttgagtcggatgacgctgctatggcgcgttttcgtggtggtttgaacagggaaattcaggatatacttgattataaggattattttgatataaccacattgtttgaatatgcttgcaaagctgaacgtgaagtgcagggacgacgatcaaagacatatactaactcttttgcaggccggggtccaacacacagctcaactccttctagccctgcaccttctacgcctagcactacatcgcgcacagggacgaccaagccagtggcgccccctgccaaaggcgccgcttcttccacaggacgtacacgggatattcagtgccatcgttgcagagggtttgggcacatgattcgggactgcccaaacaagcgtaccttgcttatacgtgacaatggtgagtactcttcagccagtgattctgaggaaactagtcatgctatgcttgccactaaccatgcagaaaatgaggaagtccacgttgatcccatcgacgccgataggtatgagagtcttgttgtgcagcgtgttctcagcacacaggttgcccaggccgaaaaaaatcagcgacacactctattccataccaagggcgtcgtgcatgaatggtcgattcgcatcatcatcgatagtggcagctgcaacaatttggcaagtacagcgttggtagagaaattatccttgcccactcgcacacatcctgatgaggacatcaacaccaacacgagcacatatacaccagcagcaccttctccagcccaggcaccatcttccccagtccaggcgccaccccttccacctgggccagtgactcgggcccgtgcaagagaattgaactacattatgctgttaaagaacgaaggcccggaagaatagacgaccagcccaactgtggcccataatggacgacctagggttggccgcccctaggggctgcgccccctctctatttatcaaggagctgcgcctcctttatttcttgagttttgttttacgttagccttagctactctcgaacacgcgcaaatctgcgctgtcttcgtgtattcagaactccaccctcgagtaatagattagattgctcgcatctttttcttgttcgttcttcgattgcgcacaggaaacgatcttcgtgatcaggccgatcttgcatcagcaaggtcggtaaccacagggagttggttcagcgattgcattggcgcctcgggcttgctcgtcgtagtcggatcgcaagggtcatcttccgccaaatcggaattatctctactcgccgaaagatcgggtacctcagcttcatcaattggtatcagatttccaggttgatcggtgagtttatcgagtgttttttttcctacagtccacaaaaccacataaaaattcaggttagaccttatcccaacacccttttgagcctcgcactttctttcaataatctgcattgttgaatttgtgtgctttcgcgtcatttgttgctggttgcattgtgttcttccaccattcaaaccctagcgccgccaccatctcccctttgatcacgccacaaactaagtcaacatcgtttccttgtttttctccttcggttacgtcaaaaaaaaaacagaaaaaacaaaccgagtcaacggccgtttccttgtttttctccttcggttacggaaaaaaaacagaaaaaaaacaaaccgagtcaacatcgtttccttgtttttctccttcggttacgtcaaaaaaaacagaaacaaaaaacaacgaaggagaaaggatacggttgtttcatcccggtcgtttgaaaacataacttgaggtaccttccttaaaccgggcataacttttcgctcgggtgtccaaaaaatctgaaatttttacaggagctagttgacaccattctgaggccggccaaactcaccttcggtctgtttggtttcgacaaaattgtcaaaaaaattcaggaaaataaagaaaaaaatccgtcaaagttctcgctcgcttttcagagaacttcctgattttctatagaccacatctgatctctgttttcggtgaaacttcgtctagctcctattttgttgcttcttgtgctgagaaaaatattaaaaaaatcatacaaaaagaaaaacaaaatcacttgtgattcctactagtggcctcgctagtacaatatttacggtactgccattctactagttccatccgtcctttgcacttgtgtccagcaatatagtttcgtgttctgcactataattcaactttgcattattgtttgattgtgctaatcattgacttgagtgcagcctacccagaactccacatatttctacgacgagcaggcttctgtttctccaggcaatcgctcatccaatctttcaccggttccacctgttggttgcagttcaccactgtggcttggtaagaacggataagaatttgataacaacactagtgtgagcgccttgtgagcagtacacccctgtttttgtcgttgtttttttcttcttcttttggtgttttggtgtttgcgctaactatggcaggagcacacgacacggtggatgcccagttgctggaagtaaggggacaagttgatggacttgctgatgacattaggacgatgcatgaacggcttaattcaacggtcacttcgacgaccgagcgtttcaaccagcttgaccttgctcaaacggcgactcgcaccacactcgacaccatcctggcacgccttgatgcgttgaccacaaagatggagcaggactacggcggtgacactgagtgggaagatggagatcgtcgtggtcgtgcacgccgtgtggttcgtcatccccctaatgacttattttctaagattaaatttaaaattccaccttttaatggcaaatatgatcctgctgcatatcttgattgggagttagaggttgaacaaaaattttcatgccatgatattgctgcacattctcaggttaaagatgctattagtgaatttactgattttgctttaatttggtggcgtgagtttaaaataaaacatcccactaccattccaaccacttgggatcagttgaaagctgcgatgcgacatcgatttgtgccttcgtattatgctcgtgatttgcttaataaaatgcagcgttttcagcaaggttctcaatctgttgaggactatttccaggagttacaaaaaggtatgattcgttgtgggatattagaggacaacgacgctgctatggcacgttttcgtggtggtttaaaccgcgaaatccaagatatacttgattataaggaatattatgatatgactactttatttgaatatgcttgcaaagctgaacgtgaagtgcagggatgccgctcgaagccatattctaacccttttgcaggacgaagctcgacatccacctcagcaccagttcctcctgcgccatccacgtccaccactactccacgcgagaagacgaccaaaccagccagcactgccccacccacaggtcgtacacgggatattcagtgtcatcgctgtagaggatttggccatgtgattcgggactgcccaaacaagtgcactttgctcattcgtgacgatggtgagtactcttccgctagtgattctgaagaaattgaacatgcactacttgccactgaccatgcagctaaagcggaggtacatgtcaacccgagcgacgctgataggtatgaaagtcttgttgtgcagcgtgttctcagtacacaggtcgctttgcccgagaagaatcagcgacacactctgttccatacaaagggtgttgtgcaggagcggtcaattcgcatcattatcgacagtggcagttgcaacaatttggcgagtaccatgctggtcgaaaagttatcgttacccactcgtaagcatccaaacccatatcacattcaatggctcaatgatggtggtaaaataaaaatcacacgttccgtgcgtgttcctttctccatgggtgcttattctgattttgttgattgtaatgttattcccatggaagcatgctctttgttacttggtcgaccttggcaatatgatactgatagcttgcatcatggtcgttcgaatcattattctttcatttttaagggtcagaaaataattatacatccaatgacacctgaacaaattgttcaagatgatcttgcccgagctgctataactgctaaacaacttgattcatcgccctctgttccttctgaaatcaagttgaagactcctgttttacttgctacacgtgctgattttgatgatctacacagtgctcatttgccatgctatgcacttatatgctctagtgtcctcatttcacttgatgatgcaccatctttggctattccccctatggttgctaaccttttgcaggagtacgctgatgtctttcccaaagacttaccaccgggtctcccaccacttcgtggcattgagcaccagatcgacctcattcccggcgcacagcttccgaaccgcgcaccgtaccgtacaaatccggatgagacgaaggagattcagcgccaggtacaggcgttgcttgacaagggatacattcgtgagtctcttagcccttgctctgttcctgtgttacttgttcccaagaaagatgggtcatggcgtatgtgtgtagactgtcgtgctattaataacatcactattcgttatcgatatcctataccacgccttgatgatatgctagatgagcttagtggtgccattattttcactaagattgatttgcgtagtggttaccaccagattagaatgaaactgggtgatgaatggaaaacgacttttaaaatgaaatttggtttatatgaatggttggttatgccgtttggattgactaatgctcccagcacttttatgcgagtgatgaatgaagttctaaggcccttcataggattgtttgtggttgtttattttgatgatattcttatttacagcaaatctaagaaagagcatttggaacatttacgtgctgtttttgatgcattgcgtgctgcccagttatttgctaacatggaaaaatgcatcttttgtacacgacgtgtctcgtttcttggttatgttgttactccacagggcattgaggtggatagcagcaagattgctgccattcgggagtggcctacaccgacgacggtcacacaaattcggagctttcttggacttgccggtttctaccgcagatttgttcgtgattttagctccattgcagcgcctcaacatgagcttacaaagaaagatgtgccatttgcttggagtgattccctggaggaagcgttcagcactttgaaaagataagttaacccaagctcccctattgcaattgcctgattttaataaagtgtttgagcttgaatgcgatgctagcggtattgggctaggtgctgttttgttacaagaaggaaaaccagttgcttattttagtgaaaaattaagcggtgctactctgaaatattctacttatgataaggagctttacgctttagtgcgcactttgcatacatggcagcactatctttggcatcgtgagtttataatccattctgatcatgaggctttaaaacatattcgtacccaaacaaatctgaaccgtcgtcatgctaaatgggtagaattcattgagtcctttccttacattattaaacacaagaacgggaaggacaatgttattgctgatgttttgtctcgtcgctataccatgctgtcacagttagattttaaaatctttggtttgcacactgtgaaagatcaatatgttgatgatgctgattttaaagatgctttcggccattgtattaatgggaaaccatggggcaaatttcacatacaggatgggttcctgtttcgcgctaacaagctgtgtgttccagctagctcggttcgtcttttgttgttacaggaagcacatggaggcggtctcatggggcactttggcgtctacaagacacatgaggtgttggctgcccacttcttttggcctcggatgcgcgctgatgttgagcgccttgttgcacgctgcactacttgtcagaaagctaagtcacggttgaacaaccatggtttgtatatgcctttgcctgttcctacttccccttggattgatatttcgatggattttgttttgggattgcctagaactaagaaggggaaggatatcatttttgtggttgttgatcgattctccaaaatggctcatttcataccttgtcataagactgatgatgctagcaatgttgctgaattgttttttagagagattattcgtttgcacggtattcccaatacaatagtctcggatcgtgatgctaagtttctgagtcatttttggagatctctgtggaataaattgggaactaaattgctgtttagcaccacttgtcaccctcagactgatggtcaaactgaggtagttaatcgaactttgtctaccatgcttagggctgttttagacaaaaattgaaacgttgggaggattgcttgcctcatgttgagtttgcttataatcatgcaacccattcttctacaaagatgtgcccttttcaaatagtttatggttacattcctagggcgcctattgctttgttttcgcttgatgctgcggacgccccacacatagatgctcttgcacatgttgaacaaatgattagtctccatgaacaaactcaacaaaacattgctgctgctaatgctaaatatcagattactggtagtaaaggccggaaactagttacttttgaacctggtgatatggtttggttgcatttgagaaaggatcgttttcctactttgcgtcgttctaaattgatgtctcgtgctgctggtccttttaagatactaaccaagattaatgataatgcttataccctcgacctgcctgcggagtttggtgtttccactagttttaatgttgcagatttgaaaccgtatgcgggagaagacgaggagttgccgtcgaggacgacttcagttcaagaaggggaggatgatgaggacatcaacaccaacacgagcacatctacaccagcagcaccttctccagcccaggcaccatcttccccagtccaggcgccaccccttccacctgggccagtgactcgggcccgtgcaaaagaattgaactacattatgctgttaaagaacgaaggcctggaagaatagacgaccagcccaactgcggcccataatggacggcctagggttggtcgccccaaggggctgcgccccctctctatttatccaggagctgcgcctcctttatttcttgagttttgttttacgttagccttagctactctcgaacacgcgcaaatctgcgctgtcttcgtgtattcagaactccaccctcgagtaatagattagattgctcgcatctttttcttgttcgttcttcgattgcgcacaggaaacgatcttcgtgatcaggccgatctagcatcagcaaggtcggtaaccacagggagttggttcagcgattgcattggcgcctcgggcttgctcgtcgtagtcggatcgcaagggtcatcttccgccaaatcggaattatctctactcaccgaaagatcgggtacctcagcttcatcacatccacatccgtatcacattcaatgcttaatgatggtggtaaaataaaggtaacacgttcggtacgtgtccccttttcactgggttcttattctgattatgctgattgcgatgttattcctatggaagcatgctctttgttattgggtcgaccttggcaatatgatactgatagtttacatcatggtcgttcaaatcattattctttcatgtttaaaggccagaaaataattatacatccaatgacccctgaccaaattttgaaagatgatcttactagggctgctaaaa

SEQ ID NO: 763 - DNA, 25770 bp, Zea mays
  source: /note="Zea mays BAC clone full insert sequence contig bacm.pk135.l06.fis19"
ctagcattgttgctgaattgttctttagagaaattattcgtttacatggtattccaaaaacaatagtctctgatcgcgatgctaagtttctaagccatttttggagatctctttggaataaattgggaactaaattgttgtttagcactacttgtcaccctcagactgatggacaaactgaggtagtaaacagaactttatctaccatgcttagggctgttttagacaagaatttgagacgttgggaggattgcttgcctcatgttgaatttgcttacaatcatgccacacattcttctacaaagatgtgccctttccagattgtttatggttacatccctagggcacctattgatttgattgcacttaatgctgcgaacgccctacatgtagatgctgctgcacatgttgaacaaatgataccatacatgaacaaacgaaacagaacattgctgctactaatgcaaaaaatcaggttgctggtagtaaaggaagaaaacatgttacttttgagccaggtgatatggtttggttgcacttgagaaaggaccggtttcctactttgcgccgttctaaattaatgcctcgtgctgctggtccttttaaggtgctaacaaagattaatgataatgcttatatccttgacctgcctgcggaatttgtgtttccactagttttaatgttgcagatttgaaaccatatatggccgaggatgcggagttgtcgtcgaggacgacttcacttcaagaaggggaggatgatgaggacatcactatgagtacgactacaccagcagcacctccacatcaagcgccacttccttcattagctgggccaatcactcgggcccgtgccagagatcttaacttcgtcatgctactgaagaatgagggcccagaagaatagacgaccagcccaactgcggcccatagtggacgacctagggttggccgccctaggggctgcgccccctctatttatccaggagctgcgcctcctttattttcgagttttgttttacgttagccttagctactctcgaacacgcgcaaatctgcgctgtcttcgtgtattcagaattccaccctcgagtaatagattagattgcttgcatctttttcttgttcgttcttcgattgcgcacaggaaacgatcttcgtgatcaggccgatctcgcatcagcaaggtcggtaaccacagggagttggttcagcgattgcattggcgcctcgggcttgctcgtcgtagtcggatcgcaagggccatcttccgccaaatcggaattatctctactcgccgaaagatcgggcacctcagctacatcatgcaccccgacacccgttttcggaatgggtgacgtgcgacaacaaaattgtgcgaaaccaccccaaacatgagttttggacctaaagtagtggattgggcatgttcgttgcgaaaaacgaagaaatggttccggtgtcaaaaactcgtgctttgtatgcacctccccgacaaccgttttcggaatgggtgacgtgcggcaacgaaattgcgcgaaaccaccccaaacataagttttggacctaaagtagtggattgggcatgttcgttgcgaaaaacgaagaaatggttccggtggcaaaaactcgtgctttgtatgcacccgacacccattttcggaatgggtgacgtgcgacaacgaaattgcgcgaaaccaccccaaacatgagttttggacctaaagtagtggattgggcatgttcgttgcgaaaaacgaagaaatggttccggtggcaaaaactcgtgctctatatgcacccgacacccgttttcggaatgggtgacgtggaacaacgaaattgcgagaaaccacaccaaacatgagttttggacctaaagtagtggattgggcatgttcgttacgaaaaacgaagaaatggttccggtggcaaaaactcgtgcttttatgcacccgacactcgttttcggaatgagtgacgtgcggcaacaaaattgcgtgaaaccaccccaaacatgagttttgtactgattgggcatgttcgttgcgaaaaacgaagaaatggttccggtggcaaaaactcgtgctttgtatgcaccctcgacaaccgttttcggaatgggtgacgtgcggcaacgaatttgcgcgaaaccaccccaaacatgagttttggacctaaagtagtggattgggcatgttcgttgcgaaaaacgaagaaatggttccggtggcaaaaactcgtgctttgtatgcacccgacacccgttttcggaatgggtgacgtgcgacaacgaaattgcgagaaaccaccccaaacatgagttttggatgtaaagtagtggattgggcatgttcgttgcgaaaaacgaagaaatggttccggtggcaaaaactcgtgctttgtatgcacccgacacccgttttcggaatgggtgacgtgcgacaacgaaattgtgcgaaaccaccccaaacatgagttttggacctaaagtagtggattgggcatgttcgttacgaaaaacgaagaaatggttccggtggcaaaaactcatgcttttatgcaccccgatacccgttttcagaatgggtgacgtgcgacaacgaaattgcgcgaaaccacctcaaacatgagttttggacctaaagtagtggattgggcatgttcgttgcaaaaaacgaagaaatggttccggtggcaaaaactcgtgctttgtatgcacctgacacctgttttcggaatgggtgacgtgcgacaacgaaattgtgtgaaaccaccccaaacatgagttttggacctaaagtagtggattgggcatgttcgttacgaaaaacgaagaaatggttccggtggcaaaaactcgtgcttttatgcacctgacactcgttttcggaatgagtgacgtgcggcaacgaaattgcgcgaaaccacccaaaacatgagttttggacctaaagtagtggattgggcatgttcgttacgaaaaacgaagaaatggttccggtggcaaaaactcgtgcttttatgcacctgacactcgtttttagaatgagtgacgtacggcaaccaaattgcgcgaaaccacccaaaacatgagttttggacctaaagtagtggattgggcatgttcgttgcgaaaaacgaagaaatggttccggtggcaaaaactcgtgcttttatgcacctaacactcgttttcagaatgagtgacgtacggcaaccaaattgcgcgaaaccacccaaaacatgagttttggacctaaagtagtggattgggcatgttcgttgcgaaaaacaaagaaatggttccggtggcaaaaactcttgctttttatgcacccgacacccgtttttggaatgggtgacgtgcgacaacgaaattgcgcgaaaccaccccaaacatgagttttggatgtaaagtagtggattggacatgttcgttgcgaaaaacgaagaaatggttctggtggcaaaaactcgtgctttgtatgcacccgacacccgtttttggaatgggtgacgtgcggcaacgaaattgcgcgaaaccaccccaaacatgagttttggacctaaagtagtggattgggcatgttcgttgcgaaaaacgaagaaatggttccggtggcaaaaactcgagctttgtatgcaccccgacaccatttttcggaatgggtgacgtgtgacaacgaaattgcgagaaatcaccccaaacatgagttttggacctaaagtagtggattgggcatgttcgttgcgaaaaacgaagaaatggttccggtggcaaaaactcgtgctttgtatgcaccccgacacccgttttcggaatgggtgacgtgtgacaacgaaattgcgcaaaaccaccccaaacatgagttttgtacctaaagtagtggattgggcatgttcgttgcgaaaaacgaagaaatagttccggtggcaaaaactcgtgctttgtatgcaccccgacaaccgttttcggaatgggtgacgtgcggcaacgaaattgtgagaaaccaccccaaacatgagttttggacctaaagtagtggattgggcatgttcgttacgaaaaacgaagaaatggttccggtggcaaaaactcgtgcttttatgcacccgacactcgttttcggaatgagtgacgtgcggcaacaaaattgcgcgaaaccaccccaaacattagttttgtacctaaagtagtggattgggcatgttcgttgcgaaaaacgaagaaatggttccggtggcaaaaactcgtgctttgtatgcaccctcgacaaccgttttcggaatgggtgacgtgcggcaacgaatttgcgcgaaaccaccccaaacatgagttttggacctaaagtagtggattgggcatgttcgttgcgaaaaacgaagaaatggttccggtggcaaaaactcgtgctttgtatgcacccgacacccgttttcggaatgggtgacgtgcgacaacgaaattgcgagaaaccaccccaaacatgagttttggacctaaagtagtggattgggcatgtttgttgcaaaaaacgaagaaatggttccggtggcaaaaactcgtgctttgtatgcacccgacacccgttttaggaatgggtgacgtgcaacaacgaaattgcgagaaatcaccccaaacatgagttttggacctaaagtagtggattgggcatgttcgttgcgaaaaacgaagaaatggttccggtggcaaaaactcgtgctttgtatgcaccccgacaaccgttttcggaatgggtgacgtgtgacaacgaaattgcgcgaaaccaccctaaacatgagttttcgacctaaagtagtggattgggcatgttcgttgcgaaaaacgaagaaatggttccggtggcaaaaactcgtgctttgtatgcaccccgacaaccgtttttggaatgggtgacgtgcggcaacgaaattgcgcgaaaccaccccaaacatgagttttggacctaaagtagtggattgggcatgttcgttgcgaaaaacgaagaaatggttccggtggcaaaaactcgtgctttgtatgcacccgacacccgttttcggaatgggtgacgtgcgacaacgaaattgcgcgaaaccaccccaagcatgagttttggatctaaagtagtggattcggcatgttcgttgcgaaaaacgaagaaatggttccggtggcaaaaactcgtgctttgtatgcacccgacacccgttttcggaatgagtgacgtgcgacaacgaaattgtgcgaaaccaccccaaacatgagttttggacctaaagtagtggatttggcatgctcgttacgaaaaacgaagaaatggttccggtggcaaaaactcgtgcttttatgcaccccgatacccgttttcagaatgggtgacgtgcgacaacgaaattgcgcgaaaccacctcaaacatgagttttggatctaaagtagtggattgggcatgttcttgcgaaaaacgaagaaatggttccggtggcaaaaactcgtgctttgtatgcacccgacacccgttttctgaatgggtgacgtgcggcaaagaaattgcgccaaaccaccccaaacatgagttttggacctaaagtagtggattgggcatgttcgttacgaaaaacgaagaaatggttccggtggcaaaaactcgtgcttttatgcaccccgacaaccgttttcagaatgggtgacgtgcggcaacgaaattgcgcgaaaccaccccaaacatgagtttcgtacctaaagtagtggattgggcatgttcgttgcgaaaaacgaagaaatggttccggtggcaaaaatcgtgctttgtatgtaccccgacaaccgttttcagaatgggtgacgtgcgacaacgaaattgtgcgaaaccaccccaaacatgagttttggacctaaagtagtggattgggcatgttcgttacgaaaaacgaagaaatggttccggtggcaaaaactcgtgcttttatgcactccgatacccgtttttagaatgggtgacgtgcgacaacgaaattgcgtgaaaccacctcaaacatgagttttggacctaaagtagtggattgggcatgttcgttgcgaaaaacgaagaaatggttccggtggcaaaaactcgtgctttgtatgcacccccgacacccgttttcggaatgggtgacgtgcgacaacgaaattgcgcgaaaccacccaaaacatgagttttggacctaaagtagtggattgggtatgttcgttacgaaaaacgaagtaatggttccggtggcaaaaactcgtgcttttatgcaccagacactcgttttcggaatgagtgacgtgcgacaacgaaattgcgcgaaaccacccaaaacatgagttttggacctaaagtagtggattgggcatgttcgttacgaaaaacgaagaaatggttccggtggcaaaaactcgtgcttttatgcacctgacactcgttttcggaatgagtgacgtgcggcaacgaaattgcgcgaaaccacccaaaacatgagttttggacctaaagtagtggattgggcatgttcgttgcgaaaaacaaagaaatggttccggtggcaaaaactcgtgctttttatgcacccgacacccgtttttggaatgggtgacgtgcgacaacgaaattgcgcgaaaccaccccaaacatgagttttggatgtaaagtagtggattggacatgttcgttgcgaaaaacgaagaaatggttccggtggcaaaaactcgtgctttgtatgcacccgacacccgttttcggaatgggtgacgtgcgacaacgaaattgttggaaaccaccccaaacatgagttttggacctaaagtagtggattgggcatgttcgttgcgaaaaacgaagaaatggttccggtggcaaaaactcgtgctttgtatgcaccccgacacccgttttcggaatgggtgacgtgcgacaacgaaattgcgcgaaaccacctctgatgtagctgaggagcccgatctttcagcgagtagagataattccgatttggcggaagatgacccttgcgatccgactacgacgagcaagcccgaggcgccaatgcaatcgctgaaccaactccctgtggttaccgaccttgctgatgcgagatcggcctgatcacgaagatcgtttcctgtgcgcaatcgaagaacgaacaagaacaagatgcgagcaatctaatctattactcgagggtggagttctgaatacacgaggacagcgcagatttgcgcgtgttcgaaagtagctaaggctaacgtaaaacaaaactcggaaaataaaggaggcgcagctcctgtataaatagagagggggcgcagcccctaggggcggccaaccctaggtcgtccattatgggccgcaattgggctggtcgtctattctttcgggccttcgttctttaacaacatgatgtagttcaattctcttgcacgggcccgagtcactggcccaggtggaaggggtggcgcctggactggggaagatggtgcctgggctggagaaggtgctgctggtgtagatgtgctcgtgttggtgttgatgtcctcatcatcctccccttcttgaactgaagtcgtcctcgacggtaactcctcatcttctcccgcatacggtttcaaatctgcaacattaaaactagtggaaacaccaaactccgcaggcaggtcaaggatataagcattatcattaatcttggttagtaccttaaaaggaccagcagcacgaggcatcaatttagaacggcgcaaagtaggaaaacgatcctttctcaaatgcaaccaaaccatatcaccaggttcaaaagtaactagtttccggcctttactaccagtaatctgatatttagcattagcagcagcaatgttttgttgagtttgttcatggagattaatcatttgttcaacatgtgcaagagcatctatgtgtggggcgtccgtagcatcaagcgaaaacaaagcaataggcgccctaggaatgtaaccataaacaatttgaaaagggcacatctttgtagaagaatgtgttgcatgattataagcaaactcaacatgaggtaagcaatcctcccaacgtttcaaatttttgtctaaaacagccctaagcatggtagacaaagttcgattaactacctcagtttgaccatcagtctgagggtgacaagtggtgctaaacagcaatttagttcctaatttattccacagagatctccaaaaatgactcagaaacttggcatcacgatccgagactattgtattgggaataccgtgcaaacgaataatctctctaaaaaacaattcagcaacattgctagcatcatcagtcttatgacaaggtatgaaatgagccattttggagaatcgatcaacaaccacaaaaatgctatccctccccttcttagttctaggcaatcccaaaacaaaatccatcgaaatatcaatccaaggggaagtaggaacaggcaaaggcatatacaaaccatggttgttcaaccgtgacttagctttctgacaagtagtgcagcgtgcaacaaggcgctcaacatcagcgcacatccgaggccaaaagaagtgggcagccaacacctcatgtgtcttgtagacgccaaagtgccccatgagaccgcctccatgtgcttcctgtaacaacaaaagacgaaccgagctagctggaacacacagcttgttagcgcgaaacaggaacccatcctgtatgtgaaatttgccccatggtttcccattaatacaatggccgaaagcatctttaaaatcagcatcgtcaacatattgatcttttacagtgtgcaaaccaaagattttaaaatctaactgtgacagcatggtatagcgacgagacaaagcatcagcaataacattgtccttcccgttcttgtgtttaataatgtaaggaaaagactcaatgaattctacccatttagcatgacgacggttcagatttgtttgggtacgaatatgttttaaagcctcatgatcagaatgaattatgaactcacgatgccaaagatagtgctgccatgtatgtaaagtgcgcactaacgcgtaaagctccttatcataagtagaatatttcagactagcaccgcttaatttttcactaaaataagcaactggttttccttcttgtaataaaacagcacctagcccaataccgctagcatcgcattcaagctcaaatactttattaaaatcaggcaattgcaataggggagcttgggttaacttatctttcaaagtgctgaacgcttcctcctgcgaatcactccaagcaaacggtacatctttctttgtaagctcatgtagaggcgctgcaatggagctaaaatcacgaacaaatctgcggtaaaaaccggcaagtccaagaaagctccgaatttgtgtgaccgtcgtcggtgtaggccactcccgaatggcagcaatcttgctgctatccacctcaatgccctgtggagtaacaacataaccaagaaacgagacacgtcgtgtgcaaaagatgcatttttccatgttagcgaataactgggcggcacgcaatgcatcaaaaacagcacttaaatgttccaaatgctctttcttagatttgctgtaaataaggatatcatcgaaataaacaaccacaaacaatcctatgaagggcctcagaacttcattcataactcgcataaaagtgctgggagcattagtcaatccaaacgacataaccaaccattcatataaaccaaatttcgttttgaaggctgttttccattcatcacctagtttcattctaatctggtggtaaccactacgcaaatcaatcttagtgaaaataatggcaccactaagctcatctagcatatcatcaaggcgtggtataggatagcgataacgaatagtgatgttattaatagcacgacagtctacacacatacgccatgacccatccttcttgggaacaagtaacacaggaacagagcaagggctaagagactcacgaatgtatcctttgtcaagcaacgcctgtacctggcgctgaatctccttcgtctcatccggatttgtacggtatggtgcgcggttcggaagctgtgcaccgggaatgaggtcgatctggtgctcaatgccacgaagcggtgggagacccggtggtaagtctttgggaaagacatcagcgtactcctgcaaaaggttagcaaccatagggggaatagccaaagatggtgcatcatcaagtgaaatgaggacactagagcatacaagtgcatagcatggcaaatgagcaccgtgtagatcatcaaaatcagcacgtgtagcaagtaaaacaggagccttcaacttaatttcagaaggaacagagggcgatggatcaagttgtttagcagttatagcagctcgggcaagatcatctttaacaatttgttcaggtgtcattggatgtataattattttctgacccttaaaaatgaaagaataatgattcgaacgaccatgatgcaagctatcagtatcatattgccaaggtcgaccaagtaacaaagagcatgcttccatgggaataacatcacaatcaacaaaatcagaataagcacccatggagaaaggaactcgcacggaacgcgtgatttttattttaccaccatcattaagccattgaatgtgatatgggtttggatgcttacgagtgggtaacgacaacttttcgaccagcatggtactcgccaaattgttgcaactgccgctgtcgataatgatgcgaattgaccgctcctgcacaacaccctttgtatggaacagagtgtgtcgctgattcttctcgggcaaagcgacctgtgtactgagaacacgctgcacaacaagactttcgtacctatcagcgtcgcccgggttgacatggacctccgccttagctgcatggtcagtggcaagtagtgcatgttcaatttcttcagaatcactagtggaagagtactcaccatcgtcacgaatgagtaaagtgcgcttgtttgggcagtcccgaatcacatggccaaaccctctacagcgatgacactgaatatcccgtgtacgacctgtgggtggggcagtgctggctggtttggtcgtcttctcgcgtggagtagtggtggacgtggatggcgcagggggaactggtgctgaggtggatgtcgagcttcgtcctgcaaaagggttagaatatggcttcgagcggcgtccctgcacttcacgttcagctttgcaagcatattcaaataaagtagtcatatcataatattccttataatcaagtatatcttggatttcgcggtttaaaccaccacgaaaacgtgccatagcagcgtcgttgtcctccaatatcccacaacgaatcatacctttttgtaactcctggaaatagtcctcaacagattgagaaccttgctgaaaacgctgcattttattaagcaaatcacgagcataatacgaaggcacaaatcgatgtcgcatcacagctttcaactgatcccaagtggttggaatggtagtgggatgttttattttaaactcacgccaccaaattaaagcaaaatcagtaaattcactaatagcagctttaacctgagaatgtgcagcaatatcatggcatgaaaatttttgttcaacctctaactcccaatcaagatatgcagcaggatcatatttgccattaaaaggtggaattttaaatttaatcttagaaaataagtcattagggggatgacgaaccacacggcgtgcacgaccacggcgatctccatcgtcccactcagtgtcaccgccgtagtcctgctccatctttgtggtcaacgcatcaaggcgtgccaggatggtgtcgagtgtggtgcgagtcgccgtttgagcaaggtcaagctggttgaaacgctcggtcgtcgaagtgaccgttgaatcaagccgttcatgcatcgtcctaatgtcatcagcaagtccatcaacttgtccctttacttccagcagctgggcatccaccgtgtcatgtgctcctgccatagttagcgcaaacaccaaaacaccaaaaaaaacgacaaaaacaggggtgtactgctcacaaggcgctcacactagtgctgttatcaaattcttatccgttcttaccaagccacagtggtgaactgcaaccaacaggtggaaccggtgaaagattggatgagcgattgcctggagaaacagaaacctactcgtcgtagaaatatgtggagttctgggtaggctgcactcaagtcaaggattagcacgaccaaacaataatgcaaagttgaattatagtgcaaaacacgaaaatatattgctggccacaagtgcaaaggacggatggaactagcagaatggcagtaccgtaaatattgtactagcgaggccactagtaggaatcacaagtgattttgtttttcttttttgtatgatttttttgatatttttctcagcacaagaagcaacaaaataggagctacacgaagtttcacctaaaacagagttcaaatgtggtctacagaaaatcagaaagttctctgaaaagcgtgcgagaactttgacggatttttttctttattttcctgaatttttttgacaattttgtcgaacccaaacagaccgaaggtgagtttggccggcctcagaatggtgtcaacaagctcctgtaaaaatttcagattttttggacacccgagcgaaaagttatgcccggtttaaggaaggtacctcaagttatgttttcaaacgaccgggatgaaacaaccgtatcctttctccttcgttgtttttttttgtttctgtttttttttgacgtaactgaaggagaaaaacaaggaaacgatgttgactcggtttttttttctgattttttttccgtaaccgaaggagaaaaacaaggaaacggccgttgactcggtttgttttttctgtttttttttacgtaaccgaaggagaaaaacaaggaaacaatgttgactcggtttgtggcgtgatcaaaggggagatggtggcggcgctaggatttgaatggtggaagaacacaatgcaaccagcaacaaggaaacgcgaaagcacacaaattcaacaatgcagattattgaaagaaagtgcgaggctcaaaagggtgctgggataagaactaacctgaatttttatgtggttttgtggactgtaggaaaaaaacgctcgataaactcaccgatcaacctggaaatctgataccaattgatgtagctgaggagcccaatctttcggcgagtagagataattccgatttggcggaagatgacccttgcgatccgactacgacgagcaagcccgaggcgccaatgcaatcgctgaaccaactccctgtggttaccgaccttgctgatgcgagatcggcctgatcacgaagatcgtttcctgtgcgcaatcgaagaacgaacaagaacaagatgcgagcaatctaatctattactcgagggtggagttctgaatacacgaggacagcgcagatttgcgcgtgttcgaaagtagctaaggctaacgtaaaacaaaactcggaaaataaaggaggcgcagctcctgtataaatagagagggggcgcagcccctaggggcggccaaccctaggtcgtccattatgggccgcaattgggctggtcgtctattcttccgggccttcgttctttaacaacatgatgtagttcaattctcttgcacgggcccgagtcactggcccaggtggaaggggtggcgcctggactggggaagatggtgcctgggctggagaaggtgctgctggtgtagatgtgctcgtgttggtgttgatgtcctcatcatcctccccttcttgaactgaagtcgtcctcgacggcaactcctcatcttctcccgcatacggtttcaaatctgcaacattaaaactagtggaaacaccaaactccgcaggcaggtcaaggatataagcattatcattaatcttggttagtaccttaaaaggaccagcagcacgaggcatcaatttagaacggcgcaaagtaggaaaacgatcctttctcaaatgcaaccaaaccatatcaccaggttcaaaagtaactagtttccggcctttactaccagtaatctgatatttagcattagcagcagcaatgttttgttgagtttgttcatggagattaatcatttgttcaacatgtgcaagagcatctatgtgtggggcgtccctagcatcaagcgaaaacaaagcaataggcgccctaggaatgtaaccataaacaatttgaaaagggcacatctttgtagaagaatgtgttgcatgattataagcaaactcaacatgaggtaagcaatcctcccaacgtttcaaatttttgtctaaaacagccctaagcatggtagacaaagttcgattaactacctcagtttgaccatcagtctgagggtgacaagtggtgctaaacagcaatttagttcctaatttattccacagagatctccaaaaatgactcgtgctttgtatgcacccgacacctgttttcggaatgggtgacgtgcgacaacgaaattgtgtgaaaccaccccaaacatgagttttggacctaaagtagtggattgggcatgttcgttacgaaaaacgaagaaatggttccggtggcaaaaactcgtgcttttatgcacgtgacactcgttttcggaatgagtgacgtgcagcaacgaaattgcgcgaaaccacccaaaacatgagttttggacctaaagtagtggattgggcatgttcgttacgaaaaacgaagaaatggttccggtggcaaaaactcgtgcttttatgcacctgacactcgttttcagaatgagtgacgtgcggcaaccaaattgcgcgaaaccacccaaaacatgagttttggacctaaagtagtggattgggcatgttcgttgcgaaaaacgaagaaatggttccggtggcaaaaactcgtgctttgtatgcacccgacacccgtttttggaatgggtgacgtgcggcaacgaaattgcgcgaaaccaccccaaacatgagttttggacctaaagtagtggattgggcatgttcgttacgaaaaacgaagaaatggttccggtggcaaaaatcgtgctttgtatgcaccccgacaaccgttttcagaatgggtgacgtgcggcaacgaaattgcgcgaaaccaccccaaacatgagttttggacctaaagtagtgggttgggcatgttcgttgcgaaaaacgataaatggttctagtggcaaaaactcgtgctttgtatgcacccccgacaaccgtttttagaatgggtgacgtgcggcaacgaaattgcgcgaaaccaccccaaacatcagttttggacctaaagtagtggattgggcatgttcgttgcgaaaaacgaagaaatggttccggtggcaaaaaactcgtgctttgtatgcacccgacacccgttttcggaatgggtgacgtgtgacaacgaaattgtgcgaaaccaccccaaacatgagttttgtacctaaagtagtggattgggcatgttcgttgtgaaaaacgaagaaatggttccggtggcaaaaactcgtgctttgtatgcaccctcgacaaccgttttcggaatgggtgacgtgcggcaacgattttgcgcgaaaccaccccaaacatgagttttggacctaaagtagtggattgggcatgttcgttgcgaaaaacgaagaaatggttccggtggcaaaaactcgtgctttgtatgcacccgacacccgttttcggaatggatgacgtgcgacaccgaaattgcgagaaaccaccccaaacatgagttttggacctaaagtagtggattgggcatgttcgttgcaaaaacgaagaaatggttccggtggcaaaaactcgtgctttgtatgcacccgacacccgttttcggaatgggtgacgtgcgacaacgaaattgcgagaaatcaccccaaacatgagttttggacctaaagtagtggattgggcatgttcgttgcgaaaaacgaagaaatggtttcggtggcaaaaactcgtgctttgtatgcaccccgacaaccgttttcggaatgggtgacgtgcggcaacgaaattgcgcgaaagcagcccaaacatgagttttggacctaaagtagtggattgggcatgttcgttgcgaaaaacgaagaaatggttccggtggcaaaaactcgtgctttgtatgcacccccgacaaccgttttcagaatgggtgacgtgcgggaacgaaattgcgcgaaaccaccccaaacatgagttttggacctaaagtagtggattgggcatgttcgttgcgaaaaacgaaaaaatagttctggtggcaaaaactcgtgcttttatgcacccgacacccgttttcggaatgggtgacgtgcggcaacgaaattgcgcgaaaccaccccaaacatgagtgttgtgcctaaagtagtagattgggcatgttcgttgcgaaaaacgaagaaatggttccggtggcaaaaactcgtgctttgtatgcaccccgacaaccgttttcagaatgggtgacgtgcggcaacgaaattgcgcgaaaccaccccaaacatgagttttggacctaaagtagtggattgagcatgttcgttgcgaaaaacgaagaaatggttccggtggcaaaaactcgtgctttgtatgcacccgacacccgttttcggaatgggttacgtgcgacaacgaaattgcgagaaaccacctcaaacatgtgttttggacctaaagtagtggattgggcatgttcgttgcgaaaaacgaagaaatggttccggtggcaaaaactcgtgctttgtatgcaccccctacacccgttttcggaatgggtgacgtgtgacaacgaaatgcgcgaaaccaccccaaacatgagttttggacctaaagtagtggattgggcatgttcgttgtgaaaaaacgaagaaatggttccagtggcaaaaactcgtgctttgtatgcacccccgacaaccgttttcggaatgggtgacgtgcggcaacgaaattgcgcgaaaccaccccaaacatgagttttggacctaaagtagtggattacgcatgttcgttgcgaaaaacgaagaaatggttccggtggaaaaaactcgtgctttgtatgcacccgacacccgttttcggaatgggtgacgtgcgacaacgaaattgcgcgaaaccagcccaaacatgagttttggacctaaagtagtggattgggcatgttcgttgcgaaaaacgaagaaatggttccggtggcaaaaactcgtgctttgtatgcaccccacacccgttttcggaatgtgatgaagacatccacactactgatgcatctataccaatacaagtaccaatttctggtcccattactcgcgctcgtgctcgtcaactcaaccatcaggtgattacactcttgagttcatgtccatcatatttagaccatggagacccgtgcactcttgttttgcttaggaatcagggagaagaccgaatgggaaaaggatttgaacatgctggattcggactgcagaagaacaccaacttgtgacggtcaccacggtcagatgcgggctcggattggaatgttcaagcacaacatggaaagcttatcaagtctacttcatatggatccggaattatagtcatatctgttctgaggccgccgtaatcattgttttcttaccgagacatttcctgccttttatgcccatggtgctgcgtcaccctattttggcccaatgggtcgtgtatcaagttaggtccattagggacgcatcctagggttgcagcacgaccccaatacccttgtggtcatcctcccatatttataaaccccctagccgccaccaagaacagcgggttttgtttagatcaagtttagctctcgctacttgcttgcaagcgcgcgtgctagttcagccgcccgtcttcttgtcttcggaaccccaccatattggagtttgatttttaaacctacatttagatctggtaattcagtacttgttctacttgttcttgctagttcttcgattgcttgcaggacgagtgccctagtggccagggtgtcacgctccacaagatcgtgacagccataggaggtggtgtatcggttgctaaggcgcagcgtctttggaaggctgtagtcgggccgtgaacgtcgtctcctcccccaatcgagttattccacaccctctcatcgaaagatcgggcaatcacccaacgggtgcacatcagtttatatctcctagacaaagcgtcagcaatgatattctcttttcctttcttgtgcttaataacataaggaaacgattcgataaattcaacccacttagcatgtctacggttcagttttccttgactacgaatatgtttggattagagatgattaaagaccaatatgttcatgatgctgattttaaagatgtgttgctgcattgtaaagatgggaaatgatggaacaaatatatcgttagtgatgggtttgtgtttagagctaacaagctatgcattacagctagctccgttcgtttgttgttgttacaggaagcacatggaggtggcttaatgggacattttggagcaaagaaaacggaggacatacttgctggtcatttcttttggcccaagatgagaagagatgtggtgagattggttgctcgttgcacgacatgtcaaaaggcgaagtcacggttaaatccacacggtttgtatttgcctctacccgttcctagtgctccttgggaagatatttctatggattttgtgctgggattgcctaggactaggaagggacgtgatagtgtgtttgtggttgttgatagattttctaagatggcacatttcataccatgtcataaaactgacgatgctactcatattgctgatttgttctttcgtgaaattgttcgcttgcatggtgtgcccaacacaatcgtttctgatcgtgatgctaaatttcttagtcatttttggaggactttgtgggcaaaattggggactaagcttttattttctactacatgtcatcctcaaactgatggtcaaactgaagttgtgaatagaactttgtctactatgttaagggcagttctaaagaagaatattaagatgtgggaggactgtttgcctcatgttgaatttgcttataatcgatcgttgcattctactacaaagatgtgcccatttcagattgtatatggtttgttgcctcgtgctcctattgatttaatgcctttgccatcttctgaaaaactaaattttgatgctactaggcgtgctgaattgatgttaaaactgcatgaaactactaaagaaaacatagagcgtatgaatgctagatataagtttgctagtgataaaggtagaaaggaaataaattttgaacctggagatttagtttggttgcatttgagaaaggaaaggtttcctgaattacgaaaatctaaattgttgcctcgagccgatggaccgtttaaagtgctagagaaaattaacgacaatgcatataggctagatctgcctgcagactttggggttagccccacatttaacattgcagatttaaagccctacttgggagaggaagttgagcttgagtcgaggacgactcaaatgcaagaaggggagaatgatgaagacatccacactattgatgcatctataccaatacaagtaccaatttctggtcccattactcgcgctcgtgctcgtcaactcaaccatcaggtgattacactcttgagttcatgtccatcatatttagaccatggagacccgtgcactcttgttttgcttaggaatcagggagaagaccgaatgggaaaaggatttgaacatgctggattcggactgcagaagaacaccaacttgtgacggtcaccacggtcagatgcgggctcggattggaatgttcaagcacaacatggaaagcttatcaagtctactttcatatggatccggaattatagtcatatctgttctgaggccgccgtaatcattgttttcttaccgagacatttcctgccttttctgcccatggtgctgcgtcaccctattttggcccaatgggtcgtgtatcaagttaggtccattagggacgcatcctagggttgcagcacgaccccaatacccttgtggtcgtcctcccatatttataaaccccctagctgccaccaagaacaacgggttttgtttagatcaagtttagctctcgctacttgcttgcaagcgcgcgtgctagttcagccgcccgtcttcttgtcttcggaaccccaccatattggagtttgatttttaaacctacatttagatctggtaattcagtacttgttctacttgttcttgctagttcttcgattgcttgcaggacgagtgccctagtggccagggtgtcacgctccacaagatcgtgacagccataggaggtggtgtatcggttgctaaggcgcagcgtctttggaaggctgtagtcgggccgtgaacgtcgtctcctcccccaatcgagttattccacaccctctcatcgaaagatcgggcaatcacccaacgggtgcacatcagaatgggtgacgtgtgccaacgaaattgcgcgaaaccaccccaaacatgagttttgtacctaaagtagtggattgggcatgttcgttgtgaaaaacgaagaaatggttccggtggcaaaaactcgtgctttgtatgcaccctcgacaaccgttttcggaatgggtgacgtgcggcaacgattttgcgcgaaaccaccccaaacatgagttttggacctaaagtagtggattgggcatgttcgttgcgaaaaacgaagatatggttccggtggcaaaaactcgtgctttgtatgcacccgacacccgttttcggaatgggtgacgtgcgacaccgaaattgcgagaaaccaccccaaacatgagttttggacctaaagtagtggattgggcatgttcgttgcaaaaacgaagaaatggttccggtgacaaaaactcgtgctttgtatgcacccgacacccgttttcggaatgggtgacgtgcgacaacgaaattgcgagaaatcaccccaaacatgagttttggacctaaagtagtggattgggcatgttcgttgcgaaaaacgaagaaatggttccggtggcaaaaactcgtgctttgtatgcacccccgacaaccgttttcggaatgggtgacgtgcggcaacgaaattgcgcgaaaccaccccaaacatgagttttggacctaaagtagtggattgggcatgttcgttgcgaaaaacgaaaaaatggttccggtggcaaaaactcgtgctttgtatgcacccgacacccgttttcggaatgggtgacgtgcgacaacgaaattgcgcgaaaccaccccaaacatgagttttggacctaaagtagtggattgggcatgttcgttgcgaaaaacgaagaaatggttccggtggcaaaaactcgtgctttgtatgcacccccgacaaccgttttcggaatgggtgacgtgcggcaacgaaattgcgcgaaaccaccccaaacatgagttttggacctaaagtagtggattgggcatgttcgttgcgaaaaacgaagaaatggttccggtggcaaaaactcgtgctttgtatgcacccgacacccgttttcggaatgggtgacgtgcgacaacgaaattgcgcgaaaccaccccaaacatgagttttggatctaaagtagtggattgggcatgttcgttgcgaaaaacgaagaaatggttccggtggcaaaaactcgtgctttgtatgaacccgacacccgttttcggaatgagtgacgtgcgacaacgaaattgtgcgaaaccaccccaaacatgagttttgtacctaaagtagtggattgggcatgctcgttacgaaaaacaaagaaatggttccggtggcaaaaactcgtgcttttatgcaccccgatacccgttttcagaatgggtgacgtgcgacaacgaaattgcgcgaaaccacctcaaacatgagttttggatctaaagtagtggattgggcatgttctttgcgaaaaacgaagaaatggttccggtggcaaaaactcgtgctttgtatgcacccgacacccgttttcggaatgggtgacgtgcggcaacgaaattgcgcgaaaccaccacaaacatgagttttggacctaaagtagtggattgggcatgttcgttacgaaaaaacgaagaaatggttccggtggcaaaaactcgtgcttttatgcacccgacactcgttttcggaatgagtgacgtgcggcaacgaaattgcgcgaaccaccccaaacatgagttttgtacctaaagcagtggattgggcttgttcgttgcgaaaaacgaagaaatggttccggtggcaaaaatcgtgctttgtatgcaccccgacaaccgttttccgaatgggtgacgtgcggcaacgaaattgcgcgaaaccaccccaaacatgagttttggacctaaagtagtgggttgggcatgtttgttgcgaaaaacgaagaaatggttccggtggcaaaaacttgtgctttgtatgcacccccgacaaccgtttttagaatgggtgacgtgcggcaacgaaattgcgtgaaaccaccccaaacatgagttttagacctaaagtagtggtttgggcatgttcgttacgaaaaacgaagaaatgattccggtggcaaaaaacttgtgctttgtatgcacccgacacccgttttcggaatgggtgacttgcgacaacgaaattgcgagaaatcaccccaaacatgagttttggacctaaagtagtggattgggcatgttcgttgcgaaaaacgaagaaactgttccggtggcaaaaactcgtgctttgtatgcacccccacacccgtttttagaatgggtgacgtgcggcaacgaaattgcgcgaaaccacccgaaacatgagttttggacctaaagtagtggattgggcatgttcgttgcgaaaaacaaagaaatgttttcggtggcaaaaactcgtgctttgtatgcactgatgaggacatcactatgagtacgactacaccagcagcacctccacatcaagcgccacttccttcattagctgggccaatcactcgggcccgtgccagagatcttaacttcatcatgctactgaagaatgagggcccagaagaatagacgaccagcccaactgcggcccatagtggacgacctagggttggccgccctaggggttgcgcccctctatttatccaggagctgcgcctcctttattttcgagttttgttttacgttagccttagctactctcgaacacgcgcaaatctgcgctgtcttcgtgtattcagaactccaccctcgagtaatagattagattgctcgcatctttttcttgttcgttcttcgattgcgcacaggaaacgatcttcgtgatcaggccgatctcgcatcagcaaggtcggtaaccacagggagttggttcagcgattgcattggcgcctcgggcttgctcgtcgtagtcggatcgcaagggtcatcttccgccaaatcggaattatctctactcgccgaaagatcgggcacctcagctacatcaattggtatcagatttccaggttgatcggtgagtttatcgagcgttttttttcctacagtccacaaaaccacataaaaattcaggttagatcttatcccagcacccttttgagcctcgcactttctttcaataatctgcattgttgaatttgtgtgctttcgcatcatttgttgctggttgcattgtgttcttccaccattcaaaccctagcgccgccaccatctcccgtttgatcacgccacaaaccgagtcaacatcgtttccttgtttttctccttcagttacgtaaaaaaaaacagaaaaaacaaaccgagtcaacggtcgtttccttgtttttctccttcggttaaaaaaacagaaaaaaaaacaaaccgagtcaacagccgcctccttgtttttctccttcggttactaaaaaaacagaaacaaaaaaaaggaaaacgaaggagaaaggatacggttgtttcatcccggtcgtttttaaaacatcacttgaggtaccttccgtaaaacgggcataacttttcgctcgggtgtccaaaaattctgaaatttttacaggaccttgttgacaccattctgaggccggccaaactcacctacggtctttttggggttcaaaaaaattgtcaaaaaaattcaggaaaataaagaaaaaaattcgtcaaagttctcgcacgctttttagagaacttcctgattttctatagaccacatctgatttctgttttaggtgaaacttcgtgtagctcctattttgttgcttcttgtgctgagaaaaatatcaataaaatcatacaaaaaagaaaaacaaaatcacttgtgattcctactagttcctttttggcatcactagtacaatatttacggtactgccattctgctagttccatccgtcctttacacttgtggccagcaatatagtttcgtgttttgcactataattcaactttgcattattgtttgatcgtgctaatccttgacttgagtgcagcctacccaaaactccacatatttctatgacgagaaggtttctgtttctccaggcaatcactcatccaatctttcaccggttccaccttttggttgcagttcaccactgtggcttggtaagaacggataagaacttgataatagcactagtgtgagcgccttgtgagcagtacacccctgtttttgtcgttggttttttctccttttggtgttttggtgtttgcactaactatggcaggagcacacgacatggtggatgcctagttgcaggaagtacggggacaagttgatggacttgctgctgacattaggacgatgcatgaacggcttgattcaacgatcacttcgacgaccgagcgtttcaaccaacttgaccttgctcaaacggcgactcgcaccacactcgacaccatcctggcacgccttgatgcattgaccacacagatggagcaggaatacggcggtgacactgagctggacgatggagatcgccgtggtcgtgcacgtcgtgtggttcgtcatcaccctaatgacttattttctaagattaaattaaaaatttcatcttttaatggtaaatatgatcctgctgcatatcttgattgggaattggaggtagaacagaaatttttatgccatgatattcctgctaatagccaagtgaaggctgccattagtgaatttactgattttgctttaatttggtggcgtgagtataaacaaaaacttcccattaacagtgtcattacttggacccaattaaaaactgccatgcgccacagatttgttccttcctattatgctcgtgatttgcttaacaaaatgcagcgttttcaacaaggttcacaatctgttgaggaatattaccaggagttacaaaagggtatgcttcgttgtggtttggttgagtcagatgacgctgctatggcgcgttttcgtggtggtttgaacagggaaattcaggatatacttgattataaggattattttgatataaccatattgtttgaatatgcttgcaaagctgaacgtgaagtgcagggacgactatcaaagacatatactaactcttttgcaggccggggtccaacacacagctcaactccttctagccctgcacctttctacgcctagcactacatcgcg

SEQ ID NO: 764 - DNA, 790 bp, Zea mays
  VARIATION (9)..(74): /replace="c" or "g" or "t"
  misc_feature (9)..(74): /note="Nucleotides given in the sequence have no preference with respect to those in the annotations for said positions"
  source: /note="Zea mays BAC clone full insert sequence contig bacm.pk119.a23.fis1"
gtacgttaaaaaaaaaaaaaaaaaaaaaaaaaaaaaaaaaaaaaaaaaaaaaaaaaaaaaaaaaaaaaaaaaaacatcacgtcgtgtggttcgtcatcccgctaatgacttattttctaagattaaatttaaaattccatcttttaatggtaaatatgatcctgctgcatatcttgattgggaattagaggtagaacagaaattttcatgccatgatattcctgctaatagccaagtgaaggctgccattagtgaatttactgattttgctttaatttggtggcgtgagtataaacaaaaacttcccattaacagtgtcattacttggacccaattaaaaactgccatgcgccacagatttgttccttcctattatgcttgtgatttgcttaacaaaatgcagcgttttcaacaaggttacagtctgttgaggaatattaccaggagttacaaaagggtatgcttcgttgtggtttggttgagtcggatgacgctgctatggcgcgttttcgtggtggtttaaacagggaaattcaggatatacttgattataaggattattttgatataaccacattgtttgaatatgcttgcaaagctgaacgtgaagtgcagggacgacgatcaaagacatatactaactctcttgcaggccggggtccaacacacagctcaactccttccagccctgcacctcctacgcctagcactacatcgcgcacagggacgaccaagccagtggcgccccctgccaaaggcgccgcttcttccacaggacgtacacgggata

SEQ ID NO: 765 - DNA, 688 bp, Zea mays
  VARIATION (620)..(623): /replace="c" or "g" or "t"
  misc_feature (620)..(623): /note="Nucleotides given in the sequence have no preference with respect to those in the annotations for said positions"
  VARIATION (659)..(661): /replace="c" or "g" or "t"
  misc_feature (659)..(661): /note="Nucleotides given in the sequence have no preference with respect to those in the annotations for said positions"
  VARIATION (674)..(675): /replace="c" or "g" or "t"
  misc_feature (674)..(675): /note="Nucleotides given in the sequence have no preference with respect to those in the annotations for said positions"
  VARIATION (677)..(677): /replace="c" or "g" or "t"
  misc_feature (677): /note="Nucleotide given in the sequence has no preference with respect to those in the annotation for said position"
  VARIATION (687)..(688): /replace="c" or "g" or "t"
  misc_feature (687)..(688): /note="Nucleotides given in the sequence have no preference with respect to those in the annotations for said positions"
  source: /note="Zea mays BAC clone full insert sequence contig bacm.pk119.a23.fis2"
ctccaaagtttgtgggggcttcctggcgaagtactgagctgacggtcctggccgaagccccttgatcatggcctcaatgacaatttcattgggcaccgttggtgcctgtgctctcaaacgcaagaaccttcggacatacgcctgaaggtattcttcgtgatcctgggtgcactggaacagagcctgagcagtaaccggcttcgtctgaaacccttggaagctagttaacaagaggtccttcagcttctgccatgaagtgatcgttcctggtcgaagggaggaataccaggtttgagcaacacttctgacagccataacaaaagatttggccatgaccgcagcattgccaccataggaagatactgttgcctcgtagctcatcaaaaactgcttcgggtctgagtggccatcgaatacgggaagctgaggaggcttgtaagacggaggccaaggtgtagcctgcagctcagcggacagaggagaagcatcgtcaaagacaaaattcccatgatggaaattgtcataccagtcatctccgttgggaaaatcctcctgatgaaggtcttggtgctgaggccttcggtgttgctcatcctgagcaaggtgacgaacttcttcaaaaacttcgtctatctgcctctgtagttcagctagcctgaaaatcttttctttcaacatctgcacttaa

SEQ ID NO: 766 - DNA, 798 bp, Zea mays
  VARIATION (15)..(72): /replace="c" or "g" or "t"
  misc_feature (15)..(72): /note="Nucleotides given in the sequence have no preference with respect to those in the annotations for said positions"
  source: /note="Zea mays BAC clone full insert sequence contig bacm.pk119.a23.fis3"
ctttcggatcgctcaaaaaaaaaaaaaaaaaaaaaaaaaaaaaaaaaaaaaaaaaaaaaaaaaaaaaaaaaaattgctagatcaactataccttgtccttctcatgttatattttacattgctggcaagtacaacaacataggacaatttcttgtgcatagaatttttatttcatctagatatgttgtttcttcactttgtgcaaataagatattggtatgttctcaagaagaaaagaatctcttgtttccatgtactttagtagaagtttcaagtttatatttgaaagacattgataaaagcttagtcatcaacatcaatcatgatgcaaaaccgaggacggtttgctgtcaagaaggggagaatgatgagaacataacccgcacagatatggccatgttaatggctcctgctacaaagacattgaggaacaaagaagttgattggggtccaagtaatgatatttccaacatttccaaccaagcaagcacatcatcaaatttaaagatatacttgggtgaggagtgcacactagagtcgaggacgactctattacaagaaggggaggatgatgaggacatcactgccatcaatacaaccacaccagcgacccccttcaccatttaatcatggaccagtgaaacgagtccgtgcacgtaaatttaattatcaggtgaactcgttccttgttgttgaagctaatcattccttaaatgaggtattaataccttgtgattactttattatgctaaggtgtttgggaggtaaaccatctagaatttgagaaggcaacaaggc

SEQ ID NO: 767 - DNA, 892 bp, Zea mays
  VARIATION (1)..(102): /replace="c" or "g" or "t"
  misc_feature (1)..(102): /note="Nucleotides given in the sequence have no preference with respect to those in the annotations for said positions"
  VARIATION (766)..(892): /replace="c" or "g" or "t"
  misc_feature (766)..(892): /note="Nucleotides given in the sequence have no preference with respect to those in the annotations for said positions"
  source: /note="Zea mays BAC clone full insert sequence contig bacm.pk119.a23.fis4"
aaaaaaaaaaaaaaaaaaaaaaaaaaaaaaaaaaaaaaaaaaaaaaaaaaaaaaaaaaaaaaaaaaaaaaaaaaaaaaaaaaaaaaaaaaaaaaaaaaaaaacccgacgcgacgctgctggttcgctggttggtgtccgttagactcgtcgacggcgtttaacaggctggcattatctactcgaaacaagaaaaatgtttccttagtttttttaatttcttaaagggtatttgtttaatttttagtcactttattttattctattttatatctaaattattaaataaaaaaactaaaatagagttttagttttcttaatttagaggctaaaatagaataaaatagatgtactaaaaaaattagtctataaaaaccattaaccctaaaccctaaatggatgtactaataaaatggatgaagtattatataggtgaagctatttgcaaaaaaaaaggagaacacatgcacactaaaaagataaaactgtagagtcctgttgtcaaaatactcaattgtcctttagaccatgtctaactgttcatttatatgattctctaaaacactgatattattgtagtactatagattatattattcgtagagtaaagtttaaatatatgtataaagatagataaactgcacttcaaacaagtgtgacaaaaaaaatatgtggtaattttttataacttagacatgcaatgctcattatctctagagaggggcacgaccgggtcacgctgcactgcaggcatgcaagctgatctgaaaaaaaaaaaaaaaaaaaaaaaaaaaaaaaaaaaaaaaaaaaaaaaaaaaaaaaaaaaaaaaaaaaaaaaaaaaaaaaaaaaaaaaaaaaaaaaaaaaaaaaaaaaaaaaaaaaaaaaaaaaaaaa

SEQ ID NO: 768 - DNA, 856 bp, Zea mays
  VARIATION (15)..(101): /replace="c" or "g" or "t"
  misc_feature (15)..(101): /note="Nucleotides given in the sequence have no preference with respect to those in the annotations for said positions"
  source: /note="Zea mays BAC clone full insert sequence contig bacm.pk119.a23.fis5"
ggaatagcgcattaaaaaaaaaaaaaaaaaaaaaaaaaaaaaaaaaaaaaaaaaaaaaaaaaaaaaaaaaaaaaaaaaaaaaaaaaaaaaaaaaaaaaaaaggacctaaagtagtggattgggcatttttgttgcgaaaaaaaaagaaatggttccggtggcaaaaacttgtgctttgtatgcaccccgacacccgttttcggaatgggtgacgtgcgacaacgaaattgtgcgaaaccaccccaaacatgagttttggacctaaagtagtggattgggcatgttcgttgcgaaaaacgaagaaatggttccgatggcaaaaactcgtgctttgtatgcacccgacacccgttttcggaatgggtgacgtgcgacaacgaaattgcgcgaaaccaccccaaacatgagttttggacctaaagtagtggattgggcatgttcgttgcgaaaaccaaaaaatggttccggtggcaaaaactcctgctttgtatgccccccacaccccttttccgaaagggtgacgtgcggcaacgaaattgcgtgaaaccacccccaacatgagttttagatctaaagtaatggatttggcatgttcgttgcaaaaaacaaaaaaatggttccggtggcgaaaactcctgctctgtatacaccccacacccgttttctgaatgggtgacgtgtgacaacgaaattgtgcgaaaccacccccaacatgaattttggatctaaaatagtggattgggcatgttcgttgcgaaaaaagaagaaaaggttcctgtggcgaaactcgtgctttgtatgcacccccacacccgatctcagaatgggtgacgtgcggcagcgaaattgcgtgtaa

SEQ ID NO: 769 - DNA, 882 bp, Zea mays
  VARIATION (15)..(103): /replace="c" or "g" or "t"
  misc_feature (15)..(103): /note="Nucleotides given in the sequence have no preference with respect to those in the annotations for said positions"
  source: /note="Zea mays BAC clone full insert sequence contig bacm.pk119.a23.fis6"
ccaaaagcggcattaaaaaaaaaaaaaaaaaaaaaaaaaaaaaaaaaaaaaaaaaaaaaaaaaaaaaaaaaaaaaaaaaaaaaaaaaaaaaaaaaaaaaaaaacgttgcgaaaaacgaagaaatggttccggtggcaaaaactcgtgcttttatgcaccccgatacccgttttcagaatgggtgacgtgcgacaacgaaattgcgtgaaaccaccccaaacatgagttttagatctaaagtagtggattgggcatgttcgttgcgaaaaacaaagaaatggttccggtggcaaaaactcgtgctttgtatgcacccgacacctgttttcggaatgggtgacgtgtgacaacgaaattgtgcgaaaccaccccaaacatgagttttggacctaaagtagtagattgagcatgttcgttgcgaaaaacgaagaaatggttccggtggcaaaaactcgtgcttttatgcatacccgttttcagaatgggtgacgtgcgacaacgaaattgcgcgaaaccacctcaaacatgagttttggacctaaagtagtggattgggcatgttcgttgcgaaaaacgaagaaatggttccggtggcaaaaactcgtgctttgtatgcacccccacacccgttttcataatgggtgacgtgcggcaacgaaattgtgcgaaaccacccaaacatgagttttggacctaaactagtggattgggcatgatcgttgagaaaaacaaagaaatggttccggtggcaaaaactcatggtttgtatgcacccgacacccgttttcggaatgggtgacgtgcgacaacgaaattgtgcgaaaccacccccacacatgagttttggatctaaatagtggattggggcatgtttcgttgcga

SEQ ID NO: 770 - DNA, 829 bp, Zea mays
  VARIATION (11)..(102): /replace="c" or "g" or "t"
  misc_feature (11)..(102): /note="Nucleotides given in the sequence have no preference with respect to those in the annotations for said positions"
  source: /note="Zea mays BAC clone full insert sequence contig bacm.pk119.a23.fis7"
cccggtgcgcaaaaaaaaaaaaaaaaaaaaaaaaaaaaaaaaaaaaaaaaaaaaaaaaaaaaaaaaaaaaaaaaaaaaaaaaaaaaaaaaaaaaaaaaaaaactgtataccacatctgatatctgttttaggtgaacttcgtgtagctcctatcttgttgcttcttgtgctaagaaaaatatcaaaaaaatcatacaacaaagaaaaaacaaaatcacctgtgatttctactagtgccttttttggcatcactagtacaatatttacgttactgccattctgctagttccatccatcctttgcacctgtggccagcaatatagtttcgtgttttgcactataattcaactttgcattattgtttgatcgtgctaatccttgacttgagtgcagcctacccacaactccacatatttctacgacgagcaggtttctgtttctccacgcaatcgctcatccaatctttcaccggttccacctgttgattgcagttcaccactgtggcttggtaagaacggataagaacttgataacagcactagtgtgagcgccttgtgagcagtacacccctgtttttgtcgttggttttttctccttttggtgttttggtgtttgcactaactatggcaggagcacccaacatggtggatgcccagttgcaggaagtaaggggacaagttgatggacttgctgctgacattaggacgatgcatgaacggcttgattcaacgatcacttcgacgaccgagcgtttcaaccaacttgaccttgctcaaacggcgactcgcaccacactcgacaccatcctggcacgccttgatgccttgac

SEQ ID NO: 771 - DNA, 840 bp, Zea mays
  VARIATION (1)..(79): /replace="c" or "g" or "t"
  misc_feature (1)..(79): /note="Nucleotides given in the sequence have no preference with respect to those in the annotations for said positions"
  source: /note="Zea mays BAC clone full insert sequence contig bacm.pk119.a23.fis8"
aaaaaaaaaaaaaaaaaaaaaaaaaaaaaaaaaaaaaaaaaaaaaaaaaaaaaaaaaaaaaaaaaaaaaaaaaaaaaaaatttctaggttgatcggtgagtttatcgagcgtttttttttcctacagtccacaaaaccacataaaaattcaggttagatcttatcccagcacccttttgagcctcgcactttctttcaataatctgcattgttgaatttgtgtgctttcgcgtcatttgttgctggttgcattgtgttcttccaccattcaaaccctagcgccgccaccatctctcgtttgatcacaccacaaaccgagtcaacattgtttccttgtttttctccttcggttacgtcaaaaaaaaacagaaaaaacaaaccgagtcaacggctgttttccttgattttctccttcggttacgaaaaaaaaacagaaaaaaaacagaaaaaaaaacaaaccgagtcaacatcgtttccttgtttttctccttcggttacgtaaaaaaaaacagaaacaaaaaacaacgaaggagaaaggatacggttgtttcattccggtcgtttgaaaacataatttgaggtaccttccttaaaccgggcataacttttcgctcgggtgtccaaaaaatctgaaatttttacaggagctagttgacaccattctgaaatttttacggtctgtttggggttcgacaaaattgtcaaaaaaattcaggaaaataaagaaaaaaatccgtcaaagttctcgcacgcttttcagagaacttcctgattttctgtagctcctatctttttgcttcttgtgctgagaaaaatatcaaaaaaatcatacaaaaaaga

SEQ ID NO: 772 - DNA, 834 bp, Zea mays
  VARIATION (12)..(100): /replace="c" or "g" or "t"
  misc_feature (12)..(100): /note="Nucleotides given in the sequence have no preference with respect to those in the annotations for said positions"
  source: /note="Zea mays BAC clone full insert sequence contig bacm.pk119.a23.fis9"
ccgtgcgcagtaaaaaaaaaaaaaaaaaaaaaaaaaaaaaaaaaaaaaaaaaaaaaaaaaaaaaaaaaaaaaaaaaaaaaaaaaaaaaaaaaaaaaaaaaggtacgcttgtttgggcagtcccgaatcatgtgcccaaaccctctgcaacgatggcactgaatatcccgtgtacgtcctgtggaagaagcggcgcctttggcagggggcgccactggcttggccggccctgtgcgcgatgtagtgctaggcgtaggaggtgcagggctggaaggagttgagctgtgtgttggaccccggcctgcaaaagagttagtatatgtctttgatcgtcgtccctgcacttcacgttcagctttgcaagcatattcaaacaatgtggttatatcaaaataatccttataatcaagtatatcctgaatttccctgttcaaaccaccacgaaaacgcgccatagcagcgtcatctgactcaaccaaaccacaacgaagcatacccttttgcaactcctggtaatattcctcaacagattgtgaaccttgttgaaaacgctgcattttgttaagcaaatcacgagcataataggaaggaacaaatctgtggcgcatggcagtttttaattgggtccaagtaatgacactgttaatgggaagtttttgtttatactcacgccaccaaattaaagcaaaatcagtaaattcactaatggcagccttcacttggctattagcaggaatatcatggcatgaaaatttctgttctacctctaattcccaatcaagatatgcagcagggatcatatttaccattaaaagatggaattttaaatttaatc

SEQ ID NO: 773 - DNA, 828 bp, Zea mays
  VARIATION (13)..(101): /replace="c" or "g" or "t"
  misc_feature (13)..(101): /note="Nucleotides given in the sequence have no preference with respect to those in the annotations for said positions"
  source: /note="Zea mays BAC clone full insert sequence contig bacm.pk119.a23.fis10"
gcggtacgcattaaaaaaaaaaaaaaaaaaaaaaaaaaaaaaaaaaaaaaaaaaaaaaaaaaaaaaaaaaaaaaaaaaaaaaaaaaaaaaaaaaaaaaaaaccttggccccgaccaactggtcaaagagaacatcaatacgaggcaaaggatacttgttcttgatagttaccgcattaagagggcggtaatctatacacagcctcaagctttcatccttcttcttcacaaatagtgctggacatccccaaggcgaagtgcttgggcgaatgaaacccttatccagcaattcttgcaactgcttcttcaactctgccaactcagcgggtggcattcggtagggcctcttggaaattggggtcgttcccggttgcaactcgatggcgaattcaacatcccggtctggtggattcctggcaattcatcagggaagacatctgcatactcacagaccactgggatcttcttcaggggtaactccgtcatagagaaagcacatgactgagaagaaccctaactaggcagaatcaaagtgaaattcccgcagaaaggagaattaacttccacggtacgactggctacatcaagcacaacttggtgcaaggtcatccaatttgcccctagaataatgtccacattttccaatcccaacacaagaagagtggttttgacaatgtggcttcccagttgaataggcacactttggtttaattgattagttgcaattttacccctaggtgtgactatcatgaatgacccttttgagtgagagaatggcagtttgcatctagcactgaacttttggctaatgaaactatgagatgcacca

SEQ ID NO: 774 - DNA, 1250 bp, Zea mays
  source: /note="Zea mays BAC clone full insert sequence contig bacm.pk119.a23.fis11"
ctactttaggtccaaaactcatgtttggggtggtttctcgcaatttcgttatcgcacgtcacacatttcgaaatcgggtgtcgggtgcatacaaagcacgagtttttgccaccgaaaccatttcttcgtttttcgcaacgaacaggcccaatccactactttaggtccaaaactcatgtttggggtggtttcctgcaatttcgttgccccacatcacccattccgaaaacgggtgtcgggtgcatacaaagcacgactttttgccaccggaaccatttcttcgtttttcgcaacgaatatgtccaatccactactttaggtccaaaactcatgtttgaggtggtttcgcgcaatttcgttgtcgcacgtcacccattccgaaaactagtgtcggggtgcatacaaagcacgagtttttgccaccggaaccatttcttcgtttttcgcaacgaacatgcccaatccactactttaggtccaaaactcatgattagggtggtttcgcgcaatttcgttgccgcacgtcacccattctaaaaacggttgtcagggtgcatacaaagcacgcgtttttgccaccgaaaccatttcttcgtttttcgcaatgaacatgcccactccactactttaggtccaaaactcatgtttgaggtagttttgcgcaatttcgttgccgcacgtcacccattctgaaaacggttgtcggggtgcatacaaagcacgagtttttgccaccggaaccatttcttcgtttttggcaacgaacatgcccaatccactactttaggtccaaaactcaagtttggggtggtttcccgcaatttcgttgtcccacgtcacccattccgaaaacgggtgtggggtgcatacaaagcacgaatttttgccaccggaaccatttcttcctttttcccaatgaacatgcccaatccactaatttaggtccaaaactcaagtttggggtggtttcccgcaatttcgttatcgcacgtcacacatttcgaaaacgggtggtcggtgcatacaaagcacgaagttttgctaccggaaacgtttcttcgttttgccacgaaaagcccaatccaactactttaggtccaaaactcaggttgggggtggtttctcgcacttcgttgtcgcacgtcacacattcgaaacagtgtcaaggtgcatacaagcacgagttctggcacaggaacaattcatcgtttggcacgacatgccatcactacttaaggtcaaactcagtt

SEQ ID NO: 775 - DNA, 1127 bp, Zea mays
  source: /note="Zea mays BAC clone full insert sequence contig bacm.pk119.a23.fis12"
caacgaaattgcgagaaaccaccccaaatatgagttttggacctaaagtagtggattgggcatgttcgttgcgaaaaacgaagaaatggttcatgtggcaaaaactcgtgctttgtatgcaccccgacacccgttttcgaaatgggtgacgtgcgacaacgaaattgcgagaaaccaccccaaacatgagttttggacctaaagtagtggattgggcatgttcgttgcgaaaaacgaagaaatggttccggtggcaaaaactcgtgctttatatgcacccccgacaaccgttttcaaaatgggtgacgtgcggcaaaaaaattgcgcgaaaccaccccaaacatgacttttggacctaaagtagtggattgggcatgttcgttgcgaaaaacgaaaaaatggttccggtggcaaaaactcgtgctttgtatgcaccccgacacccgttttcggaatgggtgacgtgcgacaacgaaattgcgcgaaaccaccccaaacatgatttttggacctaaagtagtggattgggcttgttcgttacgaaaaacgaagaaatagttccggtggcaaaaactcgtgttttgtatgcacccgacacccgttttcggaatgggtgacgtgctacaacgaaattgcgcgaaaccaccccaaacatgagttttggacctaaagtagtggattgggcatgttcgttgcgaaaaacgaagaaatggttccggtggcaaaaactcgtgctttgtatgcaccccgacacccgttttcagaatgggtgacgtgcggcaacgaaattgcgcgaaaccaccccaaacatgagttttggacctaaagtagtggattgggcatgttcgttgcgaaaaacgaaaaaatggttccggtggtaaaaactcgtgctttgtatccacccgtcacccgttttctgaatgagtgacgtggggtgtgacaactaaattgtgtcaccccaccccaaactttaggtttggacctaaagaagtggagtgggtatgttcgtagcaaaaaaaaaagaattggttccggagaaaaaaactcgtgtttttatgcaccccgctactcgttttctgaaggggtgacgtgcgacaacgaaattgcgccacaccaccccaaacatt

SEQ ID NO: 776 - DNA, 790 bp, Zea mays
  source: /note="Zea mays BAC clone full insert sequence contig bacm.pk119.a23.fis13"
tagtggattgggcatgttcgttgcaaaaaacaaagaaatggttccggtggcaaaaactcgtgctttgtatacacccgacacctgttttcggaatgggtgacgtgtgacaacgaaattgtgcgaaaccaccccaaacatgagttttggatctaaagtagtggattgggcatgttcgttgcgaaaaatgaagaaatggttccggtggcaaaaactcgtgctttgtatgcaccccgacccccgatttcagaatgggtgacgtgcgacaacgaaattgcgtgaaaccaccccaaacatgagtttttgacctaaagtagtggattgggcatgttcgttgcgacaaacaaagaaattgttctggtggcaaaaactcgtgctttgtatgcacccgacacctgttttcggaatgggtgacgtgcgaaaacgaaattgcgcgaaaccaccccaaaacatgatttttggacctaaagtagtggattggacattttcgttgtgaaaaacgaagaaatggttccggtggcaaaaactcgtgcttttatgcacctcgataccctttttcagaatgggtgacgggggacaacgaaattgcgcgaaccccccccaaacttgattttgggaccaaagttgggggatggggcattttgttggcaaaaacgaagaaatggttccggtggcaaaaactcgtgctttgtatgcacccgacacccgttttcggaacgggcgacgtgtgacaacgaaattgcgcgaaaccaccccaaacatgagttttggatctaaagtagtggattgggca

SEQ ID NO: 777 - DNA, 667 bp, Zea mays
  source: /note="Zea mays BAC clone full insert sequence contig bacm.pk119.a23.fis14"
tacgaacatgcccaatccactaatttaggtccaaaactcatgtttggggtggtttcgcgcaatttcgttgtcgcacgtcacccattccgaaaacgggtgtcgggtgcatagaaagcacgagtttttgccaccggaaccgtttcattgtttttcgcaacgaatatacccaatccactactttaggtccaaaactcatgtttgaggtggtttcgcgcaatttcgttgtcgcacgtcacccattccgaaaactagtgtcggggtgcatacaaagcacgagtttttgccaccggaaccatttcttcgtttttcgcaacgaacatgcccaatccactactttaggtccaaaactcatgtttggggtggtttcgcgcaatttcgttgtcgcacgtcacccattccgaaaacaggtgtcgggtgcatacaaagcacgagtttttgccaccggaaccatttcttcgtttttcacaacaaacatgcccaatccactaatctaggtccaaaactcatgtttggggtggttttgcgcaatttcgttgccgcacgtcacccattccgaaaacgggtgtcgggtgcatacaaagcacgagtttttgccaccagaaccatttcttcgtttttcgcaacgaacatgcccaatccactacttaggtccaaaactcatgtttgg

SEQ ID NO: 778 - DNA, 734 bp, Zea mays
  source: /note="Zea mays BAC clone full insert sequence contig bacm.pk119.a23.fis15"
tccgttcgtttgttgttgttacaggaagcacatggaggtggcttaatgggacattttagagcaaagaaaacggaggacatacttgctggtcatttcttttggcccaagatgagaagagatgtggtgagattggttgctcgttgcacgacatgtcaaaaggcgaagtcacggttaaatccacacggtttgtatttgcctctacccgttcctagtgctccttgggaagatatttctatggattttgtgctgggattgcctaggactaggaagggacgtgatagtgtgtttgtggttgttgatagattttctaagatggcacatttcataccatgtcataaaactgacgatgctactcatattgctgatttgttctttcgtgaaattgttcgcttgcatggtgtgcccaacacaatcgtttctgatcgtgatgctaaatttcttagtcatttttggaggactttgtgggcaaaattggggactaagcttttattttctactacatgtcatcctcaaactgatggtcaaactgaagttgtgaatagaactttgtctactatgttaagggcagttctaaagaagaatattaagatgtgggaggactgtttgcctcatcttgaatttgcttataatcgatcattgcattctactacaaagatgtgcccatttcagattgtatatggtttgttgcctcgtgctcctattgatttaatgcctttgccatcttctgaaaaact

SEQ ID NO: 779 - DNA, 1158 bp, Zea mays
  source: /note="Zea mays BAC clone full insert sequence contig bacm.pk119.a23.fis16"
aatcgggtgtcgggtgcatacaaagcacgagtttttgccaccggaaccatttcttcgtttttcgcaacgaacaggcccaatccactactttaggtccaaaactcatgtctggggtggtttcctgcaatttcgttgccgcacgtcacccattccgaaaacgggtgtcgggtgcatacaaagcacaacattttgccaccgggaccatttcttcgtttttcgcaacgaatatgcccaatccactactttaggtcccaaactcatgtttgaggtggtttcgcgcaatttcgttgtcgcacgtcacccacttcgaaaactagtgttggggtgcatacaaagcacgagtttttgccaccggaaccatttcttcgtttttcgcaacgaacatgcccaatccactactttaggtccaaaactcacgattagggtggtttcgcgcaatttcgttgtcgcacgtcacccatccgaaaactggtgtcggggtgcatataaaagcacgagtttttgccaccggaaaccatttccttcgttttttcgcaacgaacatgcccactccactactttaggtccaaaactcatgtttgaggtggtttcgcacaatttcgttgtcgcacgtcacccattctgaaaacgggtgttggggtgcataaaagcacgagtttttgccaccggaaccatttctatgtttttcgcaacgaacatgcccaatccactactttaggtccaaaactcatgtttgtggtggtttcgcacaatttcgttgtcgcacgtcacccattccgaaaatgggtgtcggggtgcatacaaagcacgagtttttgccaccggaaccatttcttcgtttttcgcaacgaacatgcccaatccactagtttaggtccaaaactcatgtttggggtggtttcgcgcaatttcgttgtcgcacgtcacccattccgaaaacgggtgtcgggtgcatacaaagcacgagtttttgccaccggaaccatttcttcgtttttcgcaacgaacatgcccaatccactactttaggtccaaaactcatgttttgggtggttttgcgcaatttcgttgccgcacgtcacccattctgaaaacggttatcggtacaaagcacgagtttttgccaccggaaccatttcttcgtttttcgcaacaatg

SEQ ID NO: 780 - DNA, 815 bp, Zea mays
  source: /note="Zea mays BAC clone full insert sequence contig bacm.pk119.a23.fis17"
tctgaaaacggttgtcggggtgcaataaaagcacgagtttttgccaccggaaccatttcttcgtttttcgcaacgaacatgcccaatccactactttaggtccaaaactcatgtttggggtggtttcgcacattttctttgtcgcacgtcacccattccgaaaacgggtgtcggggtgcatacaaagcatgagtttttgccaccggaaccgtttcttcgtttttcgcaacgaatatgcccaatccactattttaggtccaaaactcatgtttggggtggtttcgcgcaatttcgttgtcgcacgtcacccattccgaaaacgggtgtcggggtgcatacaaagcacgagtttttgccacaggaaccatttcttcgtttttcgcaacgaacatgccaaatccactactttaggtccaaaactcatgtttggggtggtttcgcgcaatttcgttgtcgcacgtcacccattccgaaaacgggtttggggtgcatacaaagcacgagtttttgccaccggaaccatttcttcgtttttcgcaacgaacatgcccaatacactactttaggcccaaaactcatgtttggggtggtttctcgcaatttcgttatcgcacgtcacacatttcgaaaacgggtgtcgggtgcatacaaagcacgagtttttgccaccggaaccatttcttcgtttttcgcaacgaacaggcccaatccactactttaggtccaaaactcatgtttggggtggtttcgcgcaatttcgttgtcgcacgtcacccattccaaaaacgggtgtcgggtgcatacaaagcacgtgt

SEQ ID NO: 781 - DNA, 1534 bp, Zea mays
  source: /note="Zea mays BAC clone full insert sequence contig bacm.pk119.a23.fis18"
cattaaactcgtgctttgtatgcaccccgacacccgttttcggaatgggtgacgtgctacaacgaaattgcgcgaaacctccccaaacatgagttttggacctaaagtagtggattaggcatgttcgttgcgaaaaacgaagaaatggttctggtggcaaaaactcgtgctttgtatgcacccgacacccgttttcggaatgggtgaggtgcgacaacgaaattgtgcgaaaccaccccaaacatgagttttgaacctaaagtagtggattaggcatgttcgttgcgaaaaacgaaaaaatggttccggtggcaaaaactcgtgctttgtatgcaccacgatacccgttttccgaatgggtgacgtgcgacaacgaaattgtgcgaaaccaccccaaacatgagttttggacctaaagtagtggatggggcattttcgttgagaaaaaagaagaaatggttcgggtgacaaaaactcgtgttttgtatgcacccgacacccgttttcggaatgggtgacgtgcgacaacgaaattgcgcgaaaccaccccaaacttgagttttgtacctaaagtagtggattgggcatgttcgttgcgaaaaacgaaaaatggttccggtggcaaaaactcgtgctttgtatgcaccccgaaacccgttttcggaatgggtgacgtgcggcaacgaaattgtgtgaaaccacccaaacatgagttttggacctaaagtagtggattgggcatgttcgttgcgaaaaacgaagaaatggttccggtggcaaaaactcgtgcttttatgcaccccgatacccgttttcacaatgggtgacgtgcgacaacgaaattgcgagaaaccacctcaaacatgagttttggacctaaagtagtggattgggcatgttcgttgcgaaaaaagaagaaatggttctgctggcaaaaacttgtgctttgtatgcaccccgacacccgttttcggaatgggtgacgtgcggcaaagaaattgcgcgaaaccaccccaaacatgagttttggacctaaagtagtggattgggcatgttcgttgagaaaaacaaagaaatggttccggtggcaaaaactcgtgctttgtatgcacccgacacccgttttcggaatgggtgacgtgcgacaacaaaattgtgcgaaaccaccccaaacatgagttttggacctaaagtattggattgggcatgttcgttgcaaaaaacgaagaaatggttccggtggcaaaaactcgtgctttgtatgcaccccgacacccgttttcggaatgggtgacgtgctacaacgaaattgcgcgaaacctccccaaacatgagttttggacctaaagtagtggattaggcatgttcgttgcgaaaaacgaagaaatggttctggtggcaaaaactcgtgctttgtatgcacccgacacccgttttcggaatgggtggatgtgcgacaacgaaattgtgcgaaaactcccccaacatgaggtttggacctaaagtagtggatgaggcatgttcgttgcgatat

SEQ ID NO: 782 - DNA, 1908 bp, Zea mays
  source: /note="Zea mays BAC clone full insert sequence contig bacm.pk119.a23.fis19"
ttcggaatgggtgacgtgcgacaacgaaattgcgcgaaaccacccgaaacatgagttttggacctaaagtagtggagtgggcatgttcgttgcgaaaaacgaagaaatggttccggtggcaaaaagtcgtgctttgtatgcacccgacacccgttttcggaatgggtgacgtgcggcaacgaaattgcaggaaaccaccccaaacatgagttttggacctaaagtagtggattgggcatgttcgttgtgaaaatcgaagaaatggttccggtggcaaaaactcgtgctttgtatgcacccgacacccgttttcggaatgggtgacgtgcgacaacgaaattgcgcgaaatcaccccaaacatgagttttggacctagagtagtggattgggcatgttcgttgtgaaaaacgaagaaatggttctggtggcaaaaactcgtcctttgtatgcaccccgacaaccgttttcagaatggttgacgtgctacaacgaaattgcgcgaaaccaccccaaacatgagttttggacctaaagtagtggattgggcatgttcgttgcgaaaaacgaaaaaatggttccggtggcaaaaactcgtgctttgtatgcacccgacaaccgttttcagaatgggtgacgtgcggcaacgaaattgcgcgaaaccaccccaaacatgagttttggacctaaagtagtgcattgggcatgtttgttgtgaaaaacgaagaaatggttccggtggcaaaaacttgtgctttgtatgcaccctgacacccgttttcagaatgggagacgtgcgacatcgaaattgtgtgaaaccaccccaaacatgagttttggacctaaagtagtggattgggcatgttcgttgcgaaaaatgaaaaaatggttccggtggcaaaaactcgtgctttgtatgcaccccgacacccgttttcagaatgggtgacgcgcggcaacgaaattgcgcgaaaccaccccaaacatgagttttggacctaaagtagtggattaggcatgttcgttgcgaaaaacaaagaaatggttccggtggcaaaaactcgtgttttgtatgcacccgacacccgttttcggaatggctaacgtgcgacaacaaaattgtgcgaaaccaccccaaacatgagttttggacctaaagtagtggattgggcatgttcgttgtgaaaaacgaaaaaatggttccggtggcaaaaactcgagcttttaagcaccccaatacccgttttcagaatgggtgacgtgcgacaacgaaattgcgcgaaaccaccccaaacatgagttttggacctaaagtagtggattgggcatgttcgttgcgaaaaacgaagaaatggttccggtggcaaaaactcgtgctttgtatgcacccgacacccgttttcggaatgggtgacgtgcgacaacgaaattgcgcgaaaccaccccaaacatgtgttttggacctaaagtagtggattgggcatgttcgttgcgaaaaacgaataaatggttccggtggcaaaaactcgtgctttgtacgcgccccgacacccgttttccgaatgggtgacgtgcgacaacgaaattgcgcgaaaccaccccaaacatgagttttggacctaaagtagtggattgggcatgttcgttgtgaaaatcgaagaaatggttccggtggcaaaaactcgtgctttgtatgcacccgacacccgttttcggaatgggtgacgtgcgacaacgaaattgcgcgaaatcaccccaaacatgagttttggacctagagtagtggattgggcatgttcgttgtgaaaaacgaagaaatggttctggtggcaaaaactcgtcctttgtatgcaccccgacaaccgttttcagaatggttgacgtgctacaacgaaattgcgcgaaaccac

SEQ ID NO: 783 - DNA, 1342 bp, Zea mays
  source: /note="Zea mays BAC clone full insert sequence contig bacm.pk119.a23.fis20"
ggttacggtgggaaaaaactcgtgctttatatgcacccgacaccagttttcggaatgggtgatgtgcgacaacgaaattgcgcgaaaccaccccaaacatgcgttttggacctaaagtagtggattgggcatggtcgttgcgaaaaacgaagaaatggttccggtggcaaaaactcgtgctttgtatgcaccccgacacccgttttcggaatgggtgacttgggacaacgaaattgtgcgaaaccaccccaaacatgagttttggacctaagtagtggattgggcatgttcgttgcgaaaaacgaagaaatggttctggtggcaaaaactcgtgctttgtatgcacccgacacccgttttcggaatgggtgacgtgcgacaacgaaattgcgcgaaaccaccccaaacatgagttttgaacctaaattagtggattgggcatgttcgttgtgaaaaacgaaaaaatggttctggtggcaaaaactcgtgctttgtatgcacccgacacccgttttcggaatgggtgacgtgcgacaacgaaatttgcgcgaaaccaccccaaacatgcgttttggacctaaagtagtggattgggcatgttcgttgcgaaaaacaaaaaaatggttccggtggcaaaaactcgtgctttgtatgcaccctgacacccgttttcggaatgggtgacttgcgacaacgaaattgtgcgaaaccaccccaaacatgagttttggacctaaagtagtgggattgggcatgttcgttgcgaaaaaacgaaaaaaatggttccggtggcaaaaactcgtgctttgtatgcaccccgacacccgttttcggaatgggtgacgtgctacaacgaaattgcgcgaaacctccccaaacatgagttttggacctaaagtagtggattaggcatgttcgttgcgaaaaacgaagaaatggttctggtggcaaaaactcgtgctttgtatgcacccgacacccgttttcggaatgggtgatgtgcgacaacgaaattgtgcgaaacctccccaaacatgagttttgaacctaaagtagtggattaggcatgttcgttgcgaaaaacgaagaaatggttccggtggcaaaaactcgtgcttttatgcaccccgatacccgttttcagaatgggagacgtgcgacatccaaattgtgtgaaacgaccccaaacatgagttttggacctaaagtagtggattggtcatgttcgttgcgaaaaacgaaaaaatggttccggtggcaaaaactcgtgctttgtatgcaccccgacacccgttttcagaatgggtgacgtgctgcaacgaaattgcgcgaaaccacccca

SEQ ID NO: 784 - DNA, 2393 bp, Zea mays
  source: /note="Zea mays BAC clone full insert sequence contig bacm.pk119.a23.fis21"
cctttaggtccaaaactcatgtttggggtggtttcgcacaatttctttgtcgcacgttagccattccgaaaacgggtgtcgggtgcatacaaagcacgagtttttgccaccggaaccatttctttgtttttcgcaacgaacatgcctaatccactactttaggtccaaaactcatgtttggggtggtttcgcgcaatttcgttgtctcgcgtcacccattctgaaaacgggtgtcggggtgcatacaaagcacgagtttttgccaccggaaccatttcttcatttttcgcaacgaacatgcccaatccactactttaggtccaaaactcatgtttgggttggtttcgcgcaatttcgttgtcgcacgtcacccattctgaaaacgggtattggggtgcataaatgctcgagtttttgccactggaaccatttcttcgtttttcgcaacgaacatgcccaatccactactttaggtccaaaactcatgtttggggtggtttcgcacaatttcgttgtcgcacgttacccattccgaaaacgggtgtcgggtgcatacaaagcacgagtttttgccaccggaaccatttctttgtttttcgcaacgaacatgcctaatccactactttaggtccaaaactcatgtttggggtggtttcgcgcaatttcgttgtcgcgcgtcacccattctgaaaacgggtgtcggggtgcatacaaagcacgagtttttgccaccggaaccatttcttcgtttttcgcaacgaacatgaccaatccactactttaggtccaaaactcatgtttggggtcgtttcacacaatttggatgtcgcacgtctcccattctgaaaacgggtatcggggtgcataaaagcacgagtttttgccaccggaaccatttcttcgtttttcgcaacgaacatgcccaatccactactttaggttcaaaactcatgttgggggaggtttcgcacaatttcgttgtcgcacatcaccctttccggaaacgggtgtcggggtgcatacaaagcacgagtttttgccaccggaaccatttcttcgtttttcgcaacgaacatgcccaatccactactttaggtccaaaactcatgtttggggtggtttcgcacaattttgttgtcgcacgtcacccattccgaaaacgggtgtcgggtgcatacaaagcacgagtttttgccaccggtaccatttctttgtttttctcaacgaacatgcccaatccactactttaggtccaaaactcatgtttggggtggtttcgcgcaatttcgttgccgcacgtcacccattccgaaaacgggtgtcggggtgcatacgaagcacaagtttttgccagcagaaccatttcttcttttttcgcaacgaacatgcccaatccactactttaggtccaaaactcatgtttgaggtggtttctcgcaatttcgttgtcgcacgtcacccattgtgaaaacgggtatcggggtgcataaaagcacgagtttttgccaccggaaccatttctttgtttttcacaacgaacatgcccaatccactactttaggtccaaaactcatgtttgggtggtttcacacaatttcgttgccgcacgtcacccattccgaaaacgggtgtcgggggcatacaaagcacgagtttttgccaccggaaccattttttcgtttttcgcaacgaacatgcccaatccactactttaggtccaaaactcatgtttggggtggtttcgcgcaatttcgttgtcgcacgtcaccccttttgaaaacgggtgtcgggtgcatacaaagcacgagtttttgccaccggaaccatttcttcgtttttcgcaacgaacatgcccaatccactactttaggtccaaaactcatgtttggggtggtttcgcacaatttcgttgtcgcaagtcacccattccgaaaacgggtgtcagggtgcatacaaagcacgagtttttgccaccggaaccatttcttcgtttttcgcaacgaacatgcccaatccactactttaggtccaaaactcatgtttggggtggtttcgcgcaatttcgttgtcgcacgtcacccattccgaaaacgggggtcggggtgcatacaaagcacgagtttttgccaccggaaccatttcttcgtttttcgcaacgaacatgcccaatccactactttaggtccaaaacgcatgtttggggtggtttcgcgcaatttcgttgtcgcacgtcacccattccgaaaacgggtgtcgggtgcatacaaagcaagagtttttgccaccgtaaccatttcttcgtttttcgcaacgaacatgcccaatccacaactttaggtccaaaactcatgtttgggttggtttcgcgcaatttcgttgtcgcatgtcaccca

SEQ ID NO: 785 - DNA, 1826 bp, Zea mays
  source: /note="Zea mays BAC clone full insert sequence contig bacm.pk119.a23.fis22"
tgttggaaagctctcttcgtctactttctggcggctgaagaatcaatgggagaaaccaaacgacacgtccagaaactgtcgagagagcttcgttctccaccagaacttctttctattcctctatttaagcaactagcagccaccaaagaacttgggtttttgtttgatgtaagtttagcctttgctacttccttgtaaacgcgtgtgtcggctagaccacccggatacttgaaacagaaccccaactctatcagatccgtgagcgtctgctttttatcttgttcttgcttgttctcgattgcttgcaggttcaaggttgttcttggcacggcaagagcaacaacaacaggagccagtgtaactatcgctaaggcgcagcacccttgtggttgttgtagtcggatagcacaacgtcgacctccaccccaaatcgtagttaccaggagacggtgtacctgtcgctcaaggcgccacaccatcttggttgtggtagtcgggcagccaacgtcgttctccaacaagttttccacctccatcatctctcatcgaaagatcgggcacccttctacccgttgggttatcatttaggtccaaaactcatgtttggggtggtttcgcgcaatttcgttgtcgcacgtcacccattccgaaaacgggtgtcggggtgcatacaaagcacgagtttttgccaccggaaccatttcttcttttttcgcaacgaacatgcccaatccactactttaggtccaaaactcatgtttgggggtggtttcgcacaatttcgttttcgcacgtcacccattccgaaaacaggtgtcgggtgcatacaaagcacgagtttttgccaccagaacaatttctttgtttgtcgcagcgaacatgcccagtccactactttaggtcaaaaactcatgtttggggtggtttcacgcaatttcgttgtcgcacgtcacccattctgaaaacgggtgtcggggtgcatacaaagcacgagtttttgccaccggaaccatttcttcatttttcgcaacgaacaagcccaatccactactttagatccaaaactcatgtttggggtggtttcgcgcaatttcgatgtcgcacgtcgcccgttccaaaaacgggtgtcgggtgcatacaaagcacgagtttttgccaccggaaccatttcttcgtttttcgcaatgaaattgcccaatccactactttatgtccaaaactcatgtttgggggtggtttcgcgtaattttgttgccgcaagtcaaccattctgaaaacggttgtcggggtgcatacaaagcacgagtttttgccaccgaaaccatttcttcgttttcgcaacgaacatgcccaatccactactttaggtccaaaactcatgtttggggtggtttcgcgcaatttcgttgtcgcacgtcacccattccgaaaacgggtgtcgggtgcatacaaagcacgagtttttgccaccggaaccatttcttcgtttttcgcaacgaacatgcccaatccactactttaggtccaaaactcatgtttggggtggtttcgcacaatttcgttgtcgcacgtcacccattccgaaaacgggtgtcgggtacatacaaagcacgagtttttgccagcggaaccatttctttgtttttcgcaacaaaaatgcccaatccactactttaggtccaaaactcatgtttgaggtggtttcgcgcaatttcgttgtcgcacgtcacccattctgaaaacgggtatcggggtgcataaaagcacgagtttttgccaccggagccatttcttcgtttttcgcaacgaacatgcccaatccacta

SEQ ID NO: 786 - DNA, 3278 bp, Zea mays
  source: /note="Zea mays BAC clone full insert sequence contig bacm.pk119.a23.fis23"
ttgtatgcaccccgacactagttttcggaatgggtgacgtgcgacgacgaaattgcgcgaaaccacctcaaacatgagttttggacctaaagtagtggattgggcatattcgttgcgaaaaacgaagaaacggttccggtggcaaaaactcgtgctttgtatgcacccgacacccgttttcggaatgggtgacgtgcgacaacgaaattgcgcgaaaccaccccaaacatgagttttggacctaaagtagtggattgggcatgttcgttgccaaaaacgaagaaatggttccggtggcaaaaactcgtgctttgtatgcaccccacacccgttttcggaatgggtgacgtgcgacaacgaaattgcgcgaaaccaccccaaacatgagttttggacctaaagtagtggattgggcatgttcgttgccaaaaacgaagaaatggttgcggtggcaaaaactcgtgctttgtatgcaccccgacacccgttttcggaatgggtgacgtgcggcaacgaaattgcgcaaaaccaccccaaacatgagttttggacctaaagtagtggagtgggcatgttcgttgcgaaaaacgaagaaatggttccggtggcaaaaagtcgtgctttgtatgcacccgacacccgttttcggaatgggtgacgtgcggcacgaaattgcaggaaaccaccccaaacatgagttttggacctaaagtagtggattgggcatgttcgttgcgaaaaacgaagaaatggttccggtggcaaaaactcgtgctttgtatgcaccccgacacccgatttcggaatgggtgacgtgcgacaacgaaattgcgcgaaaccacctcaaacatgagttttggacctaaagtagtggattgggcatattcgttgcgaaaaacgaagaaacggttccggtggcaaaaactcgtgctttgtatgcaccctgacaaccgtttttagaatgggtgacgtgcggcaacgaaattgcgcgaaaccaccccaaacatgagttttggacctaaagtagtggattgggcctattcgttgcgaaaaatgaagaaatggttccggtggcaaaaactcatgctttgtaagtacccgacacccgttttcggaataagtgacgtacgacaacgaaattgcgcgaaaccaccccaaacatgagttttggacctaaagtagtggcttgggcatgttcgttgcgaaaaacgaagaaatggttccggtggcaaaaactcgtgctttgtatgcaccccgacaccagttttcggaatgggtgacgtgcggcaacgaaattgcgcaaaaccacctcaaacatgagttttggacctaaagtagaggattgggcatattcgttgcgaaaaacgaagaaacggttccggtggcaaaaactcgtgctttgtatgcactcgacacccgttttcgtaatgggtgacgtgcgacaacgaaattgcgcaaaaccaccccaaacatgagttttggacctaaagttggcatgttcgttgccaaaaacgtagaaatggtcccagtggcaaaaactcgtgctttgtatgcaccccgacaaccgttttcagaatgggtgacgtgcggcaacgaaattgcgcaaaaccacctcaaacatgagttttggacctaaagtagtggagtgggcatattcgttgcgaaaaacgaagaaatggttccggtggcaaaaactcgtgctttgtatgcaccctgacaaccgtttttagaatgggtggcgtgcggcaacgaaattgcgcgaaaccaccccaaacatgagttttggacctaaagtagtggattgggcatgttcgttgcgaaaaacgaaaaaaatggttccggtggcaaaaactcgtgctttggtatgcacccgacacccgttttcggaatgggtgacgtgcgacaacgaaaatttgcgcgaaaccaccccacacatgagttttggacctaaagtagtggattgggcatgttcgttgcgaaaaacaaagaaatggtcccggtggcaaaaactcgtgctttgtatgcaccccgacactgttttcagagtgggtgacgtgcgacaacgatattgtgcgacaccacccaacacatgatttgtagacataagtagtggattgggcatgttcgttgagaaaaacgaagaaatgtttctggtggcaaaaactcgtgctttgtatgcacccgacacccgttttcggaatgggtgacgtgcgacaacgaaattgcgcgaaaccaccccaaacatgagttttggacctagattagtggattgggcatgttcgttgtgaaaaacgaagaaatggttctggtggcaaaaactcgtgctttgtatgcacccgacacccgttttcggaatgggtgacgtgcgacaacgaaatttgcgcgaaaccaccccaaacatgcgttttggacctaaagtagtggattgggcatgttcgttgcgaaaaacaaaaaaatggttccggtggcaaaaactcgtgctttgtatgcaccctgacacccgttttcagaatgggtgacttgcgacaacaaaattgtgcgaaaccacccaaacatgagttttggacctaaagtagtggattgggcatgttcgttgcgaaaaacgaaaaaatggttccggtggcaaaaactcttgcttttgtatgcacccgacacccgttttcggaatgggtgacgtgcgacaacgaaattgcgcgaaaccaccccaaacatgagtttttgacctaaagtagtggattgggcatgttcgttgcgaaaaacgaataaatggttccggtggcaaaaactcgtgctttgtacgcgccccgacacccgttttccgaatgggtgacgtgcgacaacgaaattgcgcgaaaccaccccaaacatgagttttggacctaaagtagtggattgggcatgttcgttgtgaaaaacgaagaaatggttccggtggcaaaaactcgtgctttgtatgcacccgacacccgttttcggaatgggtgacgtgcgacaacgaaattgagcgaaaccaccccaaacatgagttttggacctagagtagtggattgggcatgttcgttgtgaaaaacgaagaaatggttccggtggcaaaaactcgtgctttgtatgcaccccgacaaccgttttcagaatggttgacgtgctacaacgaaattgcgcgaaaccaccccaaacatgagttttggacctaaagtagtggattgggcatgttcgtttcgaaaaacgaaaaatggttccggtggcaaaaactcgttctttgtatgcacccgacaccc

SEQ ID NO: 787 - DNA, 3891 bp, Zea mays
  source: /note="Zea mays BAC clone full insert sequence contig bacm.pk119.a23.fis24"
tgacgtgcgacaacgaaattgcgcgaaaccacctcaaacatgcgttttgggacaaaaagtagtggatggggcatattcgttgcgaaaaacgaagaaatggttccggtggcaaaatgttgtgctttgtatgcacccgacacccgttttcggaatgggtgacgtgcgacaacgaaattgcgggaaaccaccccagacatgagttttggacctaaagtagtggattgggcctgttcgttgcgaaaaacgaagaaatggttccggtggcaaaaactcgtgctttgtatgcacccgacacccgatttcgaaatgtgtgacgtgcgataacgaaattgcgagaaaccaccccaaacatgagttttggacctaaagtagtggattgggcatgttcgttgtgaaaaacgaagaaatggttccggtggcaaaaactcgtgctttgtatgcactccacacccgttttcggaatgggtgacgtgcgacaacgaaattgcgcgaaaccaccccaaacatgagttttggacctaaagtagtggatttggcatgttcgttgcgaaaaacgaagaaatggttcctgtggcaaaaactcgtgctttgtatgcaccccgacacccgttttcggaatgggtgacgtgcgacaacgaaattgcgcgaaaccacccgaaacatgagttttggacctaaaatagtggattgggcatattcgttgcgaaaaacgaagaaacggttccggtggcaaaaactcatgctttgtatgcaccccgacacccgttttcggaatgggtgacgtgcgacaaagaaattgtgcgaaaccaccccaaacatgagttttggacctaaagtagtggattgggcatgttcgttgcggaaaacgaaaaaatggttccggtggcaaaaactcgtgcttttattgcaccccgacaaccgttttcaaaatgggtgacgtgcggcaacaaaattgcgcaaaaccaccccaaacatgagttttgtacctaaagtagtggattgggcatgtttgttgcgaaaaacgaagaaatggttccggtggcaaaaactcgtgctttgtatgcacccgacaccctgttttcggaataggtgacgtacgacaacgaaattgcgcgaaaccaccccaaacatgagttttggacctaaagtagtggattgggcatgttcgttgccaaaaacgaagaaatggttccggtggcaaaaacttgtgctttgtatgcaccccgacaaccgttttcagaatgggtgacgtgcggcaacgaaattgcgcaaaactacctcaaacatgagttttggacctaaagtagtggagtgggcatgtttgttgcgaaaaacgaagaaatggtttcggtggcaaaaacgcgtgctttgtatgcaccctgacaaccgtttttagaatgggtgacgtgcggcaacgaaattgcgcgaaaccaccctaatcatgagttttggacctaaagtagtggattgggcatgttcgttgcgaaaaacgaagaaatggttccggtggcaaaaactcgtgctttgtatgcaccccaacactagttttcggaatgggtgacgtgcgacaacgaaattgcgcgaaaccacctcaaacatgagttttggacctaaagtagtggattgggcatattcgttgcgaaaaacgaagaaatggttccggtggcaaaaagttgtgctttgtatgcacccgacacccgttttcggaatgggtgacgtgcggcaacgaaattgcaggaaaccaccccaaacatgagttttggacctaaagtagtggattgggcctgttcgttgcgaaaaacgaagaaatggttccggtggcaaaaactcgtgctttgtatgcacccgacacccgttttcgaaatgtgtgacgtgcgataacgaaattgcgagaaaccaccccaaacatgagttttggacctaaagtagtggattgggcatgttcgttgcgaaaaacgaagaaatggttccggtggcaaaaactcgtgctttgtatgcaccccgacactagttttcggaatgggtgacgtgcgacgacgaaattgcgcgaaaccacctcaaacatgagttttggacctaaagtagtggattgggcatattcgttgcgaaaaacgaagaaacggttccggtggcaaaaactcgtgctttgtatgcacccgacacccgttttcggaatgggtgacgtgcgacaacgaaattgcgcgaaaccaccccaaacatgagttttggacctaaagtagtggattgggcatgttcgttgccaaaaacgaagaaatggttccggtggcaaaaactcgtgctttgtatgcaccccacacccgttttcggaatgggtgacgtgcgacaacgaaattgcgcgaaaccaccccaaacatgagttttggacctaaagtagtggattgggcatgttcgttgccaaaaacgaagaaatggttccggtggcaaaaactcgtgctttgtatgcacccgacacccgttttcggaatgggtgacgtgcgacaacgaaattgcgcgaaaccaccccaaacatgagttttggacctaaagtagtggattgggcatgttcgttgcgaaaaacgaagaaatgttcccggcggcaaaaactcgtgctttgtatgcacccgacacccgttttcgtaatgggtgacgtgcggcaacgaaattgcgcgaaaccaccccaaacatgagttttggacctaaagtagtggattgggcatgttcgttgccaaaaacgaagaaatggttccggtggcaaaaactcgtgctttgtatgcaccccacacccgttttcggaatgggtgacgtgcgacaacgaaattgcgcgaaaccaccccaaacatgagttttggacctagagtagtggattgggcatgttcgttgtgaaaaacgaagaaatggttctggtggcaaaaactcgtgctttgtatgcacccgacacccgttttcggaatgggtgacgtgcgacaacgaaatttgcgcgaaaccaccccaaacatgcgttttggatctaaagtagtggattgggcatgttcgttgcgaaaaacaaagaaatggttccggtggcaaaaactcgtgctttgtatgcaccccgacacccgttttcggaatgggtgacttgcgacaacgaaattgtgcgaaaccaccccaaacatgagttttggacctaaagtagtggattgggcatgttcgttgcgaaaaacgaagaaatggttctggtggcaaaaactcgtgctttgtatgcaccccgacacccgttttcggaatgggtgacgtgctacaacgaaattgcgcgaaccctccccaaacatgagttttggacctaaagtagtggatcaggcatgttcgttgcgaaaaacgaagaaatggttctggtggcaaaaactcgtgctttgtatgcacccgacacccgtttccggaaagggtgatgtgcgacaacgaaattgtgcgaaacctccccaaacatgagttttgaacctaaagtagtggattgggcatgttcgttgcgaaaaacgaagaaatggttccggtggcaaaaactcgtgcttttatgcaccccgatacccgttttcagaatgggagacgtgcgacattgaaattgtgtgaaacgaccccaaacatgagttttggacctaaagtagtggattgggcatgttcgttgcgaaaaacgaagaaatggttccggtggcaaaaactcgtgctttgtatgcaccccgacacccgttttcagaatgggtgacgcgcggcaacgaaattgcgcgaaaccaccccaaacatgagttttggacctaaagtagtggattaggcatgttcgttgcgaaaaacaaagaaatggtttcggtcgcaaaaactcgtgctttgtatgcacctgacacccgttttcggaatggctaa

SEQ ID NO: 788 - DNA, 2192 bp, Zea mays
  source: /note="Zea mays BAC clone full insert sequence contig bacm.pk119.a23.fis25"
ctgtgcatgtttgttgcgaaaaatgaagaaatggttccggtggcaaaaactcgtgctttgtatgcaccccgacacccgttttcagaatgggtgacgtgcggcaacgaaattgcgtgaaaccaccccaaacatgagtttttgacctaaagtagtggattgggcatgttcgttgcgacaaacaaagaaattgttttggtggcaaaaactcgtgctttgtatgcacccgacacccgttttcggaatgggtgacgtgcgacaacgaaattgcgcgaaaccaccccaaacatgagttttggacctaaagtagtggattgggcatattcgttgcgaaaaacgaatagatgattccggtggcaaaaactcgtgctttgtatgcaccagacacccgttttcggaatgggtgacgtgctacaacgaaattgcgcgaaaccaccccaaacatgagttttggacctaaagtagtggattgggcatgttcgttgcgaaaaacgaagaaatggttccggtggcaaaaactcgtgctttgtatgcaccccgacaaccgttttcagaatgggtgacgtgcggcaacgaaattgcgcgaaaccaccccaaacatgagttttggacctaaagtagtggattgggcatgttcgttgcgaaaaacgaaaaaatggttccggtggtaaaaactcgtgctttgtgtgcacccgacacccgttttcggaatgggtgacgtgcgacaacgaaattgtgagaaaccaccccaaacatgagttttggacctaaagtagtggattggacatgttcgttgtgaaaaacgaagaaatggttccggtggcaaaaactcgtgcttttatgcaccccgatacccgttttcagaatgggtgacgtgcgacaacgaaattgcgcgaaaccacctcaaacatgagttttagacccaaagtagtggattgggcatgtttgtagcgaaaaacaaagaaatggttccggtggcaaaaactcgtgctttgtatgcaccccgacacccgttttcggaatgggtgacgtgcgacaacgaaattgtgcgaaaccacccaaacatgagttttggacctaaagtagtggattgggcatgttcgttgcgaaaaacaaagaaatggttccggtggcaaaaactcgtgctttgtctggacccgacacctgttttcggaatgggtgacgtgcgacaaaaattgtgcgaaaccaccccaaacatgagttttggacctaaatagtggattgggcatgttcgttgcgaaaaatgaagaaatggttccggtggcaaaaactcgtgctttgtatgcaccccgacacccgatttcagaatgggtgacgtgcggcaacgaaattgcgtgaaaccaccccaaacatgagtttttgacctaaagtagtggattgggcatgttcgttgcgacaaacaaagaaattgttctggtggcaaaaactcgtgctttgtatgcaccccgacacccgttttcggaatgggtgacgtgcgaaaacgaaattgtgcgaaaccacccccaaacatgagttttggacctaaagtagtggattgggcatgttcgttgcgaaaaaagaagaaatggttccggtggcaaaaactcgtgctttgtatgcaccccgacacccgttttcggaatgggtgacgtgcgacaacgaaattgcgcgaaaccaccccaaacatgagttttggacctaaagtagtggattgggcatattcgttgcgaaaaacgaagaaatgattccggtggcaaaaactcgtgctttgtatgcaccagacacccgttttcggaatgggtgacgtgctacaacgaaattgcgcgaaaccaccccaaacatgagttttggacctaaagtagtggattgggcatgttcgttgcgaaaaacgaagaaatggttccggtggcaaaaactcgtgctttgtatgcaccccgacaaccgttttcagaatgggtgacgtgcggcaacgaaattgcgcgaaaccaccccaaacatgagttttggacctaaagtagtggattgggcatgttcgttgcgaaaaacaaaaaaatggttccggtggtaaaaactcgtgctttgtgtgcacccgacacccgttttcggaatgggtgacgtgggacaacgaaattgggagaaaccaccccgaacaaaaattttggacttatagtagtggattggggatgtttgttggg

SEQ ID NO: 789 - DNA, 3645 bp, Zea mays
  source: /note="Zea mays BAC clone full insert sequence contig bacm.pk119.a23.fis26"
tgtgttggggtggtttctcgcaatttcgttgtcgcacgtcacccatttcgaaaacgggtgttggggtgcatacaaagcacgagtttttgccaccggaaccatttcttcgtttttcgcaacgaacatgcccaatccactactttaggtccaaaactcatgtttggggtggtttcgcgcaatttccttgtcgcacgtcacccattccaaaaacgggtgtcagggtgcatacaaagcacgaatttttgccaccggaaccatttcttcctttttcgcaacgaacatgcccactccactactttaggtccaaaactcatgtttgaggtggtttcgcgcaatttcgttgtcgcacgtcacccatttcgaaaacgggtgtcggggtgcatacaaagcacgagtttttgccagcggaaacatttcttcgtttttcgcaacgaacatgcccaactcactactttaggtccaaaactcatgtttgaggtggttttgcgcaatttcgttgccgcacgtcacccattctgaaaacggttgtcggggtgcatataaaacacgagtttttgccaccagaaccgttttttcgttttttcacaacgaacatgccccaatccactactttaggtacaaaactcatgtttggggtggtttcgcgcaatttcgttgccgcacgtcacctgttctgaaaacggttgtcggggtgcatacaaagcacgagtttttgccgccggaaccatttcttcgtttttcgcaacgaacatgcccaatccactactttaggtccaaaactcatgtttggggtggtttggcgtaacttcgttgccgcacgtcaaccattctgaaaacgggtgtcggggtgcatacaaagcacgagtttttgccaccggaaccattttaacgtttttcgcaacgaacatgcccaatccactactttaggtccaaaactcatgtttggggtggtttcgcgcaatttcgttgtcgcacgtcgcccgttccgaaacgggtgtcgggtgcatacaaagcacaagtttttgcctccggaaccatttcttcgtttttcacagcgaacttgcccaatccactactttaggtccaaaactcatgtttggggtggtttcgcgtaatttcgttgccccacgtcaaccattctgaaaacagttgtccgggtgcatacaaagcacgagtttttgccaccggaaccatttctttgttttcgcaacgaacatgcccaatccactactttaggtccaaaactcatgtttggggtggtttcgcgcaatttcgttgtcgcacgtcacccattctgaaaacggttgtcggggtgcatacaaagcacgagtttttgccaccagaaccatttcttcgtttttcgcaacgaacatgcccaatccactactttaggtccaaaactcatgtttggggtggtttcgcgcaatttcgttgccgcacgtcacccgttctgaaaacggttgtcggggtgcatacaaagcacgagtttttgccgccagaaccatttcttcatttttcgcaacaaacatgcccaatccactactttaggtccaaaactcatgtttgcggtggtttcgcgcaatttcattgtcgcacgtcacccattccaaaaacgggtgtcggggtgcatacaaagctcgtagtttttgccagcggaaccatttcttcgtttttcgcaacgaacgtgcccattccactactttaggtccaaaactcatttttgaggtggtttcgcgcaatttcgttgtcgcatgtcactcattctgaaaacgggtatcggggtgcataaaagcacgagtttttgccaccggaatcatttcttcgtttttcgcaacgaacatgcccaatccactatttaggtccaaaactcatgtttggggtggtttcgcacaatttcgttgtcgcacgtcacccattccgaaaacgggtgtcgggtgcatacaaagcacgagtttttgccgccggaaccatttcttcgtttttcgcaacgaatatgcccaatccactactttaggtccaaaactcatgtttggggtggtttcgcgtaatttcgttgccgcacgtcaaccattctgaaaacgggtgtcggggtgcatacaaagcacgagtttttgccaccggaaccatttcttcgtttttcgcaacgaacatgcccaatccactactttaggtccaaaactcatgtttggggtggtttcgcgcaatttcgttgtcgcacgtcgcccgttccgaaacgggtgtcgggtgcatacaaagcacaagtttttgccaccggaaccatttcttcgtttttcgcaacgaacttgcccaatccactactttaggtccaaaactcatgtttggggtggtttcgcgaaatttcgttgccccacgtcaaccattctgaaaacggttgtcagggtgcatacaaagcacgagtttttgccaccggaaccatttctttgttttcgcaacgaacatgcccaatccactactttaggtccaaaactcatgtttggggtggtttcgcgcaatttcgttgtcgcacgtcacccattccgaaaacgggtgtcgggtgcatacaaagcacgagttttagccaccggaaccattttttcgtttttcgcaacgaacatgcctaatccactactttaggtccaaaactcatgtttggggtggtttcgcgcaatttcgttgtcgcacgtcacccattctgaaaacggttgtcggggtgcatacaaagcacgagtttttgccaccggaaccatttcttcgtttttcgcaacgaacatgcccaatccactactttaggtccaaaactcatgtttggggtggtttcgcgcaatttcgttgccgcacgtcacccgttctgaaaacggttgtcggggtgcatacaaagcacgagtttttgccgccagaaccatttcttcatttatcgcaacaaacatgcccaatccactactttaggtccaaaactcatgtttgggttggtttcgcgcaatttcattgtcgcacgtcacccattccgaaaacgggtgtcggggtgcatacaaagtgatgaagctgaggtgcccgatctttcggcgagtagagataattccgatttgtcggaagatgacccttgcgatccgactacgacgagcaagcccgaggcgccaatgcaatcgctgaaccaactccctgtggttaccgaccttgctgatgcgagatcggcctgatcacgaagatcgtttcctgtgcgcaatcgaagaacgaacaagaacaagatgcgagcaatctaatctattactcgagggtggagttctgaatacacgaagacagcgcagatttgcgcgtgttcgagagtagctaaggctaacgtaaaacaaaactcgggaaataaaggaggcgcagctcctgaataaatagagagggggcgcagcccctaggggcggccaaccctaggtcgtccattatgggccgcaattgggctggtcgtctattcttccgggccttcgttctttaacaacatgatgtagttcaattctcttgcacgggcccgagtcactggcccaggtggaaggggtggcgcctgggctggagaaggtgctgctggtgtagatgtgctcgtgttggtgttgatgtccgcatcatcctccccttcttgaactgaagtcatcctcgacg

SEQ ID NO: 790 - DNA, 2026 bp, Zea mays
  source: /note="Zea mays BAC clone full insert sequence contig bacm.pk119.a23.fis27"
cggcatttttttttttcccttccacattttgtaaaaaggggtttagggggcataaaaatgccggttttttgtcccccgggtcttttttttttttttttccaaaccgaatacgcccacttcctttttttaggtcaaaatacgcgttgttgggggggtttttggcaaaattccgttcccccctttcaaactattcgaaaaggcgggtttaaggggaataaaaagcaggagttttacccaccgaaacctttttttctttgttcacaacgaacagccccattccacttctttggcccaaaacctcatgttggggggggtttgtcgcaatttcgttatcgcacgtcacacatttcgaaatcgggtgtcgggtgcatacaaagcacgagtttttgccaccggaaccatttcttcgtttttcgcaacgaacaggcccaatccactactttaggtccaaaactcatgtctggggtggtttcctgcaatttcgttgccgcacgtcacccattccgaaaacgggtgtcgggtgcatacaaagcacaacattttgccaccggaaccatttcttcgtttttcgcaacgaatatgcccaatccactactttaggtccaaaacgcatgtttgaggtggtttcgcgcaatttcgttgtcgcacgtcacccattccgaaaactagtgttggggtgcatacaaagcacgagtttttgccaccggaaccatttcttcgtttttcgcaacgaacatgcccaatccactactttaggtccaaaactcatgtttggggtggtttcgcgcaatttcgttgccgcacgtcacccattctaaaaacggttgtcagggtgcatacaaagcacgcgtttttgccaccgaaaccatttcttcgtttttcgcaacgaacatgcccactccactactttaggtccaaaactcatgtttgaggtagttttgcgcaatttcgttgccgcacgtcacccattctgaaaacggttgtcggggtgcatacaaagcacaagtttttgccaccggaaccatttcttcgtttttggcaacgaacatgcccaatccactactttaggtccaaaactcatgtttggggtgggttcgcgcaatttcgttgtcgcacgtcacccattccgaaaacgggtgtggggtgcatacaaagcacgagtttttgccaccggaaccatttcttcgtttttcgcaacgaacatgcccaatccactactttaggtccaaaactcatgtttggggtggtttctcgcaatttcgttatcgcacgtcacacatttcgaaaacgggtgtcgggtgcatacaaagcacgagtttttgctaccggaaccgtttcttcgtttttcgcaacgaacaggcccaatccactattttaggtccaaaactcatgtttggggtggtttctcgcaatttcgttatcgcacgtcacacattacgaaaacgggtgtcgggtgcatacaaagcacgagtttttgccgccggaaccatttcttcgtttttggcaacgaacatgcccaatccactaatttaggtccaaaactcatgtttggggtggtttcgcgcaatttcgttgtcgcacgtcacccattccgaaaacgggtgtcgggtgcatagaaagcacgagtttttgccaccggaaccgtttcattgtttttcgcaacgaatatacccaatccactactttaggtccaaaactcatgtttgaggtggtttcgcgcaatttcgttgtcgcacgtcacccattccgaaaactagtgtcggggtgcatacaaagcacgagtttttgccaccggaaccatttcttcgtttttcgcaacgaacatgcccaatccactactttaggtccaaaactcatgtttggggtggtttcgcgcaatttcgttgtcgtacgtcacctattccgaaaacaggtgtcgggtgcatacaaagcacgagtttttgccaccggaaccatttcttcgtttttcgcaacaaacatgcccaatccactactttaggtacaaaactcatgtttggggttgtat

SEQ ID NO: 791 - DNA, 2882 bp, Zea mays
  source: /note="Zea mays BAC clone full insert sequence contig bacm.pk119.a23.fis28"
gcgtcaccctattttggcccaatgggtcgtgtatcaagttaggtccattagggacgcatcctagggttgcagcacgacctcaatacccttgtggtcgtcctcccatgtttataaaccccctagccgccaccaagaacagcgggttttgtttagatcaagtttagctctcgctacttgcttgcaagcgcgcgtgctagttcagccgcccgtcttcttgtcttcggaaccccaccatattggagtttgatttttaaacctacatttagatctggtaattcagtacttgttctacttgttcttgctagttcttcgattgcttgcaggacgagtgccctagtggccaaggtgtcacgctccacaagatcgtgacaaccataggaggtggtgtatcggttgctaaggcgcagcgtctttggaaggctgtagtcgggccgtgaacgtcgtctcctcccccaatcgagttattccacaccctctcatcgaaagatcgggcaatcacccaacgggtacatcatagtggattgggcatattcgttgcgaaaaacgaagaaacggttccggtggcaaaaactcatgctttgtatgcactccgacacccgttttcggaatgggtgacgtgcgacaaagaaattgtgcgaaaccaccccaaacatgagttttggacctaaagtagtggattgggcatgttcgttgcgaaaaacgaagaaatggttcctttggaaaaaactcgtgcttttatgcaccccgatacccattttcagaatgagtgacgtgcgacaacgaaattgcgcaaaaccacctcaaacatgagttttggacctaaagtagtggattgggcatgttcgttgcgaaaagcgaagaaatggttccagtggcaaaaactcgtgctttgtatgcaccccgacacccgttttcggaatgggtgacgtgcgacaacgaaattgtgcgaaaccaccccaaacatgagttttggacctaaagtagtggattgggcatgttcgttgcgaaaaacgaagaaatggtaccggtggcaaaaactcgtgctttgtatgcacccgacaccttttttcggaatgggtgacgtgcgacaacgaaaatgcgcgaaaccaccccaaacatgagttttggacctaaagtagtggattgggcatgttcgttgcgaaaaacgaagaaatggttccggtggcaaaaactcgtgcttttattgcacccgacaaccgttttcagaatgggtgacgtgcggcaacgaaattgcgtgaaaccaccccaaacatgagtttttgacctaaagtagtggattgggcatgttcgttgcgacaaacaaagaaattgttttggtggcaaaaactcgtgctttgtatgcacccgacacctgttttcggaatgggtgacgtgcgaaaacgaaattgtgcgaaaccacccccaaacatgagttttggacctaaagtagtggattgggcatgttcgttgcgaaaaaagaagaaatggttccggtggcaaaaactcgtgctttgtatgcaccccgacacccgttttcggaatgggtgacgtgcgacaacgaaattgcgcgaaaccaccccaaacatgagttttggacctaaagtagtggattgggcatattcgttgcgaaaaacgaagaaatgattccggtggcaaaaactcgtgctttgtatgcaccaaacacccgttttcggaatgggtgacgtgcgacaacgaaattgcgcgaaaccaccccaaacatgagttttggacctaaagtagtggattgggcatgttcgttgcgaaaaacgaagaaatggttccgttggcaaaaactcgtgctttgtttgcaccccgacacccatttttggaatgggtgacgtgcgacaacaaaattgcgcgaaaccaccccaaacatgagttttggacctaaagtagtggattgggcatattcgttgcgaaaaacgaaaaattgattccggtggcaaaaactcgtgctttgtatgcacccgacacccgttttcagaatgggtgacttgcgacaacaaaattgcgcgaaaccaccccaaacatgagttttggacctaaagtagtggattgggcatgttcgttgcgaaaaacgaagaaatggttccggtggcaaaaacacgtgctttgtatgcaccccgacaaccgttttcaaaatgggagacgtgcggaaacgaaattgcgcgaaaccacctcaaacatgagttttggacctaaaatagtggattgggcatgttcgttgcgaaaaacgaaaaaatggttccggtggcaaaaactcgtgctttgtatgcacccgacacccgttttcggaatgggtgacgtgcgacaacgaaattgtgtgaaaccacccgaaacatgagttttggacctaaagtagtggattgggcattttcgttgcgaaaaacgaagaaatggttccgatggcaaaaactcgtgcttttttatgcaccccgatacccgttttcagaatgggtgacgtgcgacaacgaaattgtgcgaaaccacccgaaacatgagttttggacctaaagtagtggattgggcatttttgttgcgaaaacaaagaaatggttccgctggcaaaaactcgtgctttgtatgcaccccgacacccgttttcggaatgggtgacgtgcgacaacgaaattgtgcgaaaccaccccaaacatgagttttggacctaaagtagtggattgggcatgttcgttgcgaaaaaagaaaaaatggttccggtggcaaaaactcgtgctttgtatgccccccacccccgtttttggaaagggggaagtgcggcaaccaaattgcgcgaaacccccccaaacattaggtttagacctaaagtagtggaatggggatgttcgttggcaaaaaaaaaa

SEQ ID NO: 792 - DNA, 3557 bp, Zea mays
  source: /note="Zea mays BAC clone full insert sequence contig bacm.pk119.a23.fis29"
tgagttttgaacctatagtagtggattgggaatgttcgttgcgaaaaacgaagaaatggttccggtggcaaaaactcgtgctttgtatgcaccccgataaccgttttcagaacgggtgacgtgcggcaacgaaattgcgcgaaaccaccccaaacatgagttttggtcctaaagtagtggatcgggcatgttcgttgcgaaaaacgaagaaatggttcctgtggcaaaaactcgtgctttgtatgcaccccgacacccgttttcggaatgggtgacgtgcgacaacgaaattgcgcgaaaccaccccaaacatgagttttggacctaaagtagtggattgggcatgttcgttgcgaaaaacgaagaaatggttccggtggcaaaaactcgtgctttgtatgcaccccgacaccagttttcggaatgggtgacgtgcggcaacgaaattgcgcaaaaccacctcaaacatgagttttggacctaaagtagtggattgggcatattcgttgcgaaaaacgaaaaaacggttccggtggcaaaaactcgtgctttgtatgcaccctgacaaccgtttttaaaatgggtgacgtgcggcaacaaaattgcgcgaaaccaccccaaacatgagttttggacctaaagtagtggattgggcctattcgttgcgaaaaatgaagaaatggttccggtggcaaaaactcatgctttgtaagtacccgacacccgttttcggaataagtgacgtacgacaacgaaattgcgcgaaaccaccccaaacatgagttttggacctaaagtagtggattgggcatgttcgttgcgaaaaacgaagaaatggttccggtggcaaaaactcgtgctttgtatgcaccccgacacccgttttcggaatgggtgacgtgcgacaacgaaattgcgcgaaaccaccccaaacatgagttttggacctaaagtagtggattgggcatgttcgttgcgaaaaacgaagaaatggttcctgtggcaaaaactcgtgctttgtatgcaccccgacacccgttttcggaatgggtgacgtgcgacaacgaaattgcgcgaaaccacccgaaacatgagttttggacctaaagtagtggagtgggcatgttcgttgcgaaaaacgaagaaatggttccggtggcaaaaagtcgtgctttgtatgcacccgacacccgttttcggaatgggtgacgtgcggcaacgaaattgcaggaaaccaccccaaacatgagttttggacctaaagtagtggattgggcatgttcgttgcgaaaaacgaagaaatggttccggtggcaaaaactcgtgctttgtatgcacccgacacccgatttcgaaatgtgtgacgtgcgataacgaaattgcgagaaaccaccccaaacatgagttttggacctaaagtggtggattgggcatgttcgttgtgaaaaacgaagaaatggtttcggtggcaaaaactcgtgctttgtatgcactccacccccgttttctgaatgggtgacgtgcgacaacgaaattgcgcgaaaccaccccaaacatgagttttggacctaaagtagtggattgggcatgttcgttgcgaaaaacgaagaaatggttcctgtggcaaaaactcgtgctttgtatgcaccccgacagccgttttcggaatggttgacgtgcgacaacgaaattgcgcgaaaccaccccaaacatgagttttggacctaaaatagtggattgggcatattcgttgcgaaaaacgaagaaacggttccggtggcaaaaactcatgctttgtatgcaccccgacacccgttttcggaatgggtgacgtgcgacaaagaaattgtgcgaaaccaccccaaacatgagttttggacctaaagtagtggattgggcatgttcgttgcggaaaacgaagaaatggttccggtggcaaaaactcgtgcttttattgcaccccgacaaccgttttcagaatgggtgacgtgcggcaacgaaattgcgcaaaaccaccccaaacatgagttttgtacctaaagtagtggattgggcatgtttgttgcgaaaaacgaaaaaatggttccggtggcaaaaactcgtgctttgtatgcacccgacacctgttttcggaataggtgacgtacgacaacgaaattgcgcgaaaccaccccaaacatgagttttggacctaaagtagtggattgggcatgttcgttgcgaaaaacgaagaaatggttccggtggcaaaaactcgtgctttgtatgcaccccgacactagttttggaaatgggtgacgtgcgacaacgaaattgcgcgaaaccacctcaaacatgagttttggacctaaagtagtggattgggctattttcgttgcgaaaaacaatgaaacggttccggtggcaaaaactcgtgctttctatgcacccgacacccgttttcggaatgggtgacgtgcgacaacgaaattgcgcgaaaccaccccaaacatgagttttggacctaaattagtggattgggcatgttcgttgccaaaaacgaagaaatggttccggcggcaaaaactcgtgctttgtatgcacccgacacccgttttcgtaatgtgtgacgtgcgataacgaaattgcgcgaaaccaccccaaacatgagttttggacctaaagtagtggattgggcatgttcgttgccaaaaacgaagaaatggttccggtggcaaaaactcgtgctttgtatgcaccccacacccgttttcggaatgggtgacgtgcgacaacgaaattgcgcgaaaccaccccaaacatgagttttggacctaaagtagtggattgggcatgttcgttgccaaaaacgaagaaatggttgcggtggcaaaaactcgtgctttgtatgcagcccgacacccgttttcggaatgggtgacgtgcggcaacgaaattgcgcaaaaccaccccaaacatgagttttggacctaaagtagtggagtgggcatgttcgttgcgaaaaacgaagaaatggttccggtggcaaaaactcgtgctttgtatgcaccccgacacccgttttcggaatgggtgacgtgcggcaacgaaattgcgcgaaaccaccccaaacttgagttttggagctaaagtagtggattgggcatttttgttgcgaaaaacgaagaaatggttccggtggcaaaaactcgtgctttgtatgcacccgacacccgttttcggaatgggtgacgtgggacaacgaaattgcgagaaaccaccccaaacctgagttttggacctaaagtagtggattgggcattttcgttgggaaaaacgaagaaatggttccggtggcaaaaactcgtgctttgtatccaaccgacaaccgttttcggaatgggtgacgtgcgacaacgaaattgtgcgaaaccaccccaaacatgagttttggacctaaagtagtggattaggcatgttcgttgcgaaaaacgaagaaatggttccggtggcaaaaactcgtgctttgtacgcaccccgacacccgttttcagaatgggtgacgtgcggcaacgaaa

SEQ ID NO: 793 - DNA, 3814 bp, Zea mays
  source: /note="Zea mays BAC clone full insert sequence contig bacm.pk119.a23.fis30"
ttgggggtggtttcgcacaatttcgttttcgcacgtcacccattccgaaaacaggtgtcgggtgcatacaaagcacgagtttttgccaccaaaacaatttctttgtttgtcgcaacgaacatgcccaatccactactttaggtcaaaaactcatgtttggggtggtttcacgcaatttcgttgccgcacgtcacccattctgaaaacgggtgtcggggtgcatacaaagcacgagtttttgccaccggaaccatttcttcatttttcgcaacaaacatgcccaatccactactttagatccaaaactcatgtttgggggggtttcgcgcaatttcgttgtcgcacgtcgcccgttccgaaaacgggtgtcgggtgcatacaaagcacgagtttttgcgaccgaaaccatttctttgtttttcgcaacgaacatgcctaatccactactttaggtccaaaactcatgtttggggtggtttcgcgcaatttcgttgtcgcacgtcacccattctgaaaacgggtatcggggtgcataaaagcacgagtttttgccaacggaaccatttcttcgtttttcgcaacgaaaatgcccaatccactactttaggtccaaaactcatgtttggggtgggttcgcacaatttcattgtcgcacgtcacccattccgaaaacgggtgtcggggtgcataaaaagcacgagtttttgccaccggaaccatttctttttttttcgcaacgaacatgcccgatccactactttaggagccaaactcatgtttgggggggtttcgcgcaaattcgttgccgcacgtcaccctttccgaaaacgggtgtcggggtgcatacaaagcacgagttttttgccaccggaaccatttcttcgtttttcgcaacgaacatgccccatccactactataggttcaaaactcatgtttggggtggtttcgcgcaatttcgttgtcgcacgtcacccaattctgaaaacgggtgtcggggtgcaaacaaagcacgagttttttccaccggaaccattttttttgttttttcgcaacgaacatgcccaatccactactttaggtccaaaacgcatgtttggggtggtttcgcgcaaatttcgttgtcgcacgtcacccattccgaaaacgggtgtcgggtgcatacaaagcacgagtttttgccaccagaaccatttcttcgtttttcacaacgaacatgcccaatccactactctaggtccaaaactcatgtttggggtggtttcgcgcaatttcgttgtcgcacgtcacccattccgaaaacgggtgtcgggtgcatacaaagcacgagtttttgccaccagaaccatttcttcgtttttcgcaacgaacatgcccaatccactacttaggtccaaaactcatgtttggggtggtttcgcacaatttcgttgtcgcaagtcacccattccgaaaacgggtgtcggggtgcatacaaagcacgagtttttgccaccggaaccatttcttcgtttttcgcaacgaacatgcccaatccactactttaggtccaaaacgcatgtttggggtggtttcgcgcaatttcgttgccgcacgtaacccattccgaaaactggtgtcgggtgcatataaagcacgagttttttccaccgtaaccatttcttcgtttttcgcaacgaacatgcccaatccactactttaggtccaaaactcatgtttgggttggtttcgcacaatttcgttgtcgcacgtcacccattctgaaaacgggtattggggtgcataaaagcacgagtttttgccactggaaccatttcttcgtttttcgcaacgaacatgcccaatccactactttaggtccaaaactcatgtttgtggtggtttcgcacaattttgttgtcgcacgttagccattccgaaaatgggtgtcgggtgcatacaaaacacgagtttttgacaccggaaccatttctttgtttttcgcaacgaacatgcctaatccactactttaggtccaaaactcatgtttggggtggtttcgcgcaatttcgttgccgcgcgtcacccattctgaaaacgggtgtcggggtgcatacaaagcacgagtttttgccaccggaaccatttcttcatttttcgcaacgaacatgcccaatccactactttaggtccaaaactcatgtttggggtggtttcgcacaatttcgatgtcgcacgtcacccattctgaaaacgggtgtcagggtgcatacaaaagcacaagtttttgccaccggaaccatttcttcgtttttggcaacgaacatgcccaatccactaatttaggtccaaaactcatgtttggggtggtttcgcgcaatttcgttgtcgcacgtcacccattccgaaaacgggtgtcgggtgcatagaaagcacgagtttttgccaccggaaccgtttcattgtttttcgcaacgaacatacccaatccactactttaggtccaaaacttcattgtttggggtggtttcgcgcaatttcgttgtcgcacgtcacccattccgaaaactggtgtcggggtgcatacaaagcacgagtttttgccaccggaaccatttcttcgtttttcgcaacgaacatgcccaatccactactttaggtccaaaactcatgtttggggtggtttcgcgcaatttcgttgtcgtacgtcacccattccgaaaacgggtgtcgggtgcatacaaagcacgagtttttgccaccggaaccatttcttcgtttttcgcaacaaacatgcccaatccactactttaggtacaaaactcatgtttggggtggttttgcgcaatttcgttgccgcacgtcacccattctgaaaacggttgtcggggtgcaataaaagcacgagtttttgccaccggaaccatttcttcgttttccgcaacgaacatgcccaatccactactttaggtccaaaactcatgtttggggtggtttcgcacaatttctttgtcgcacgtcacccattccgaaaacgggtgtcggggtgcatacaaagcacgagtttttgccacaggaaccatttcttcgtttttcgcaacgaacatgccaaatccactactttaggtccaaaactcatgtttggggtggtttcgcgcaatttcgttgtcgcacgtcacccattccgaaaacgggtgtggagtgcatacaaagcacgagtttttgccaccggaaccatttcatcgtttttcgcaacgaacatgcccaatccactacttgaggtccaaaactcatgtttggggtggtttcgcgcaatttcgtcgtcgcacgtcacccattccgaaaacgggtgtcgggtgcatacaaagcacgagtttttgccactggaaccatttcttcgtttttcgcaacagaacatgcccaatcccctactttaggtacaaaactcatgtttgggggtggttttgcgcaaattcgttgccgcacgtcacccattctgaaaaccggtgtcggggtgcatacaaagcacgagtttttgccaccggaaccatttcttcgttttccgcaacgaacatgcccaatccactactttaggtccaaaactcatgtttggggtggtttcgcacaatttctttgtcgcacgtcacccattccgaaaacgggtgtcggggtgcatacaaagcatgagtttttgccaccggaaccgtttcttcgtttttcgcaacgaatatgcccaatccactattttaggtccaaaactcatgtttggggtggtttcgcgcaatttcgttgtcgcacgtcaaccattccgaaaacggctgtcggggtgcatacaaa

SEQ ID NO: 794 - DNA, 3418 bp, Zea mays
  source: /note="Zea mays BAC clone full insert sequence contig bacm.pk119.a23.fis31"
cggttgtcagggtgcatataaagcacgagtttttgccaccagaaccatttcttcgtttttcgcaacgaacatgcccaatccactactttaggtccgaaactcatgtgttggggtggtttctcgcaatttctttgtcgcacgtcacccatttcgaaaacggggtgttggaggggcatacaaagcacgagtttttgccaccgaaaacatttccttcgtttttcgcaacgaacatgcccactccactactttaggtccaaaactcatgtttgagggggtttcgcgcaatttcgttgtcgcacgtcacccattccgaaaacgggtgtcgggtgcatacaaagcgcgagtttttgccaacggaacctttttttttttttcgtaacgaaaaagccccatccactactttaggtccaaaactcatgtttggggtggtttcgcgcaaatttgttgtcgcacgtcacccatttcgaaaacgggtgttgggtgcatacaaagcacgagtttttgccaccggaaccatttttttgtttttcgcaacgaacatgcccaatccactactttaggtccaaaactcatgtttggggtggtttcgcacaattttgttgtcgcaagtcacccattccgaaacgggtgtcagggtgcatacaaagcacgagtttttgccaccggaaccatttcttcgtttttcgcaacgaacatgcccaatccactactttaggtccaaaacgcatgtttggggtggtttcgcgcaaatttcgttgtcgcacgtcacccattccgaaaacgggtgtcgggtgcatacaaagcacgagtttttgccaccagaaccatttcttcgtttttcgcaacgaacatgcctaatccactactttaggtccaaaactaatgtttggggaggtttcgcgcaatttcgttgtagcacgtcacccattccgaaaacgggtgtcggggtgcatacaaagcacgagtttttgccaccggaaccatttcttcgtttttcgcaacgaacatgcccaatccactactttaggtccaaaactcatgtttggggtggtttcgcacaattttgttgtcgcacgtcacccattccgaaaacgggtgtcgggtgcatacaaagcacgagtttttgccaccggtaccatttctttgtttttctcaacgaacatgcccaatccactactttaggtccaaaactcatgtttggggtggtttcgcgcaatttcgttgccgcacgtcacccattccgaaaacgggtgtcggggtgcatacgaagcacaagtttttgccagcagaaccatttcttcttttttcgcaacgaacatgcccaatccactactttaggtccaaaactcatgtttgaggtggtttctcgcaatttcgttgtcgcacgtcacccattgtgaaaacgggtatcggggtgcataaaagcacgagtttttgccaccggaaccatttctttgtttttcacaacgaacatgcccaatccactactttaggtccaaaactcatgtttgggtggtttcacacaatttcgttgccgcacgtcacccattctgaaaacgggtgtcgggtgcatacaaagcacgagtttttgccaccggaaccatttctttttttttcgcaacgaacatgcccaatccactactctaggtccaaaactcatgtgtggggtggtttcgcgcaaatttcgttgtcgcacgtcacccattccgaaaacgggtgtcgggtgcatacaaagcacgagtttttgccatcggaaccatttctttgtttttcgcaacgaacatgcccaatccactactttaggtccaaaactcatgtttggggtggtttcgcacaatttcgttgtcgcacgtcacccattccgaaaacgggtgtcggggtgcatacaaagcacaagtttttgccaccggaaccatttctttttttttcgcaacaaaaatgcccaatccactactttaggtccaaaactcatgtttgaggtggtttcgcgcaatttcgttgtcgcacgtcacccattctgaaaacgggtatcggggtgcataaaagcatgagtttttgccactggaaccatttcttcgtttttcgcaacgaacatgcccaatccactgtttaggtccaaaactcatgtttggggtggtttcgcccaatttttgtcgcacgtcacccattccgaaaacgggtgtcgggtgcatacaaagcacgagttttttccaccagaaccatttctttgtttttcgcaacgaacatgcccaatccactactttaggtccaaaactcatgtttgggtggtttcgcaccaatttcgttgtcgcacgtcacccattccgaaaacgggtgtcggggtgcatacaaagcacgagtttttgccaccggaaccatttctttgtttttcgctacaaacatgcccaatccactactttaggtccaaaactcatgtttgaggtggtttcgcgcaatttcgttgtcgcacgtcacgcattctgaaaacgggtatcggggtgcataaaagcacgagtttttgccaccggaaccatttcttcgtttttcgcaacgaacatgcccaatccactactttaggtccaaaactcatgtttggggtggtttcacacaatttcgttgtcgcacgtcactcattccgaaaacgggtgtcgggtggatacaaaacacgagtttttaccaccgaaacatttttcgtttttcgcaacgaacatgcccaatccactattttaggtcaaaaactcatgtttgcggtggtttcgcgcaatttcgtttccgcacgtcacccattctgaaaacggttgtcggggtgcatacaaagcacgtgtttttgccaccggaaccatttcttcgtttttcgcaacgaacatgcccaatccactactttaggtctaaaactcatgtttggggtggtttcgcgcaattttgttgtcgcacgtcacccattccgaaaacgggtgtcgggtgcatacaaagcacgagtttttgccaccggaatcattttttcgtttttcgcaacgaatatgcccaatccactactttaggtccaaaactcatgtttggggtggtttcgcgcaatttcgttgtcgcacgtcacccattccgaaaacgggtgtcggggtgcatacagagcacgaatttttgccaccggaaccatttcttcttttttcgcaacgaacatgcccaatccactactttaggtccaaaactcatgtttgggggtggtttcgcacaatttcgttttcgcacgtcacccattccgaaaactggtgtcgggtgcatacaaagcacgagtttttgccaccagaacaatttctttgtttgtcgcaacgaacatgcccaatccactactttaggtcaaaaactcatgtttggggtggtttcacgcaatttcgttgccgcacgtcacccattctgaaag

SEQ ID NO: 795 - DNA, 5722 bp, Zea mays
  source: /note="Zea mays BAC clone full insert sequence contig bacm.pk119.a23.fis32"
tgttgcgaaaaacgaagaaatggttccggtggcaaaaactcgtgctttgtatgcacccgacacctgttttcggaataggtgacgtacgacaacgaaattgcgcgaaaccaccccaaacatgagttttggacctaaagtagtggattgggcatgttcgttgcgaaaaacgaagaaatggttccggtggcaaaaactcgtgctttgtatgcaccccgacactagttttcggaatgggtgacgtgcgacaacgaaattgcgcgaaaccacctcaaacatgagttttggacctaaagtagtggattgggcatattcgttgcgaaaaacaatgaaacggttccggtggcaaaaactcgtgctttgtatgcacccgacacctgtcttcggaatgggtgacgtgcgacaacgaaattgcgcgaaaccaccccaaacatgagttttggacctaaattagtggattgggcatgttcgttgccaaaaacgaagaaatggttccggtggcaaaaactcgtgctttgtatgcacccgacacccgttttcgaaatgtgtgacgtgcgataacgaaattgcgagaaaccaccccaaacatgagttttggacctaaagtagtggattgggcatgttcgttgtgaaaaacgaagaaatggttccggtggcaaaaactcgtgctttgtatgcaccccgacacccgttttcggaatgggtgacgtgcgacaacgaaattgcgcgaaaccaccccaaacatgagttttggacctaaagtagtggattgggcatgttcgttgagaaaaacaaaaaaatggttctggtggcaaaaactcgtgctttgtatgcacccgacacccgttttcggaatgggtgacgtgcgacaacaaaattgtgcgaaaccaccccaaacatgagttttggacctaaaggagtggattgggcatgttcgttgcgaaaaacgaagaaatggttccggtggcaaaaactcgtgctttgtaagcaccccgacacccgttttcggaatgggtgacgtgctacaacgaaattgcgcgaaacctccccaaacatgagttttggacctaaagtagtggattaggcatgttcgttgcgaaaaacgaaaaaattgttctggtggcaaaaactcgtgctttgtatgcacccgacacccattttcggaatgggtgatgtgcgacaaccaaattgtgcgaaacctccccaaacatgagttttggacctaaagtagtggattaggcatgttcgttgcgaaaaacgaagaaatggttctggtggcaaaaactcgtgctttgtatgcacccgacacccgttttcggaatgggtgacgtgcgacaacgaaatttgcgcgaaaccaccccaaacatgcgttttggacctaaagtagtggattgggcatgttcgttgcgaaaaacgaagaaatggttccggtggcaaaaactcgtgctttgtatgcaccctgacacccgttttcggaatgggtgacttgcgacaacaaaattgtgcgaaaccaccccaaacatgagttttggacctaaagtagtggattgggcatgttcgttgcgaaaaacaaaaaaatggttccggtggcaaaaactcgtgctttgtatgcacccgacacccgttttcggaatgggtgacgtgcgacaacgaaattgcgcgaaaccaccccaaacatgagttttggacctaaagtagtggattgggcatgttcgttgcgaaaaacgaagaaatggttccggtggcaaaaactcgtgctttgtatgcacccgacacccgttttcggaatgggtgacgcgggacaacgaaaccgcgcgaaacccacccaaacctgagttttggacctaaagtagtggattgggcatgttcgttgcgaaaaacgaagaaatggttccggtggcaaaaactcgtgctttgtatgcaccccgacacccgttttcggaatgggtgacttgcgacaacgaaattgcgcgaaaccaccccaaacatgagttttggacctaaagtagtggattgggcatgttcgttgcgaaaaacgaagaaatggttccggtggcaaaaactcgtgctttgtagcacccgacacctgttttcagaataggtgacgtgcgacaacgaaattgcgcgaaaccaccccaaacatgagttttggacctaaagtagtggattgggcatgttcgttgcgaaaaaggaagaaatggttccggtggcaaaaacttgtgctttgtatgcaccccgacactagttttcggaatgggtgacgtgcgacaacgaaattgcgcgaaaccacctcaaacatgagttttggacctaaagtagtggattgggtattttcgttgcgaaaaacaatgaaacggttccggtggcaaaaactcgtgctttgtatgcacccgacacccgttttcggaatgggtgacgtgcgacaacgaaattgcgcgaaaccaccccaaacatgagttttggacctaaattagtggattgggcatgttcgttgccaaaaacgaagaaatggttccggcggcaaaaactcgtgctttgtatgcacccgacacccgttttcgtaatgtgtgacgtgcgataacgaaattgcgagaaaccaccccaaacatgagttttggacctaaaatagtggattgggcctgttcgttgcgaaaaacgaagaaacggttccggtagcaaaaactcgtgctttgtatgcacccgacacccgttttcgaaatgtgtgacgtgcgataacgaaattgcgagaaaccaccccaaacatgagttttggacctaaagtagtggattgggcatgttcgttgcgaaaaacgaagaaatggttccggtggcaaaaactcgtgctttgtatgcaccccacacccgttttcggaatgggtgacgtgcgacaacgaaattgcgcgaaaccaccccaaacatgagttttggacctaaagtagtggattgggcatgttcgttgccaaaaacgaagaaatggttccggtggcaaaaactcgtgctttgtatgcaccccgacaaccgttttcagaatgggtgacgtgcggcaacgaaattgcgcaaaaccccctcaaacatgagttttggacctaaagtagtggagtgggcatgttcgttgcgaaaaacgaagaaatggtttcggtggcaaaaacgcgtgctttgtatgcaccctgacaaccgtttttggaatgggtgacgtgcggcaacgaaattgcgcgaaaccaccctaatcatgagttttggacctaaagtagtggattgggcatgttcgttgcgaaaaacgaagaaatggttccggtggcaaaaactcgtgctttgtatgcacccgacacccgttttcggaatgggtgacgtgcgacaacgaaattgtgcgaaaccaccccaaacatgagttttggacctaaatagtggattgggcatgttcgttgcgaaaaacgaagaaatggttccggtggcaaaaactcgtgcttttatgcaccccgatacccgttttcagaatgggtgacatgcgacaacgaaattgcacgaaaccacctcaaacatgagttttggacctaaagtagtagattgggcacgttcgttgcgaaaaacgaagaaatggttccgctggcaaaaactcgtgctttgtgatgcggacatcaacaccaacacgagcacatctacaccagcagcaccttctccagcccaagcgccaccccttccacctgggccagtgactcgggcccgtgcaagagaattgaactacatcatgttgttaaagaacgaaggcccggaagaatagacgaccagcccaattgcggcccataatggacgacctagggttggccgcccctaggggctgcgccccctctctatttattcaggagctgcgcctcctttatttcccgagttttgttttacgttagccttagctactctcgaacacgcgcaaatctgcgctgtcttcgtgtattcagaactccaccctcgagtaatagattagattgctcgcatcttgttcttgttcgttcttcgattgcgcacaggaaacgatcttcgtgatcaggccgatctcgcatcagcaaggtcggtaaccatagggagttggttcagcgattgcattggcgcctcgggcttgctcgtcgtagtcggatcgcaagggtcatcttccgacaaatcggaattatctctactcgccgaaagatcgggcacctcagcttcatcaattggtatcagatttccaggttgatcggtgagtttatcgagcgtttttttttcctacagtccacaaaaccgcataaaaaattcaggttagatcttatcccagcacccttttgagcctcgcactttctttcaataatctgcattgttgaatttgtgtgctttcgcgtcatttgttgctggttgcattgtgttcttccaccattcaaaccctagcgccgccaccatctcccgtttgatcacgccacaaaccgagtcaacggccgtttccttgattttctccttcggttacgaaaaaaaacagaaaaaaaaacaaaccgagtcaacgaccgcttccttgtttttctccttcggttacatcaaaaaaaaaacagaaacaaaaaaaagaaaacgaaggagaaaggatacgtttgtttcatcccggtcgtttttaaaacataacttgaggaaccttccgtaaaccgggcataacttttcgctcgagtgtccaaaaaatctgaaatttttacaggagctagttgacaccattctgaaaacatcccggtctgtttggggttcgacaaaattgtcaaaaaaattcaggaaaataaagaaaaaaatccgtcaaagttctcgcacgcttttcagagaacttcctgattttctgtagaccacatctgatatctgttttaggtgaaacttcgtgtagctcctatcttgttgcttcttgtgctgagaaaaatatcaaaaaaatcatacaaaaaagaaaaacaaaaatcacctgtgatttctactagtgcctttttggcatcactagtacaatatttacggtactgccattctgctagttccatccatcctttgcacctgtggccagcaatatagtttcgtgttttgcactataattcaactttgcattattgtttgatcgtgctaatccttgacttgagtgcagcctacccacaactccacatatttctacgacgagcaggtttctgtttctccacgcaatcgctcatccaatctttcactagttccacctgttggttgcagttcaccactgtggcttggtaagaacagataagaacttgataacagcactagtgtgagcgccttgtgagcagtacacccctgtttttgtcgttggtttttctccttttggtgtttgcgctaactatggcaggagcacacgacatggtggatgcccagttgcaggaagtaaggggacaagttgatggacttgccgctgacattaggacgatgcatgaacggcttgattcaacgatcacttcgacgaccgagcgtttcaaccaacttgaccttgctcaaacggcgactcgcaccacactcgacaccatcctggcacgccttgatgcattgaccacaaagatggagcaggaatacggcggtgacactgagcaggacgatggagatcgccgtggtcgtgcacgtcgtgtggttcgtcatccccctaatgacttattttctaagattaaatttaaaattccatcttttaatggtaaatatgatcctgctgcatatcttgatt

SEQ ID NO: 796 - DNA, 5091 bp, Zea mays
  source: /note="Zea mays BAC clone full insert sequence contig bacm.pk119.a23.fis33"
ctttgtatgcacccgacacccgttttcggaatgggtgacgtgcgacaataaaattgtgtgaaaccaccccaaacatgagttttgaacctaaagtagtggattgggcatgttcgttgcgaaaaacgaagaaatggttccggtggcaaaaactcgtgctttgtatgcaccccaacacccgttttttggaaggggagacgtgccaacacaaatttgcgcaaaacccccccaaacaagattttgggacctaatatagtggattgcgcatgttctgtgcaaaaaacaaaaatggggttcgtgtggcaaaaactcgtgctttgtacgcgccccgacacccgttttccgaatgggtgacgtgcgacaacgaaattgcgcgaaaccaccccaaacatgagttttggacctaaagtagtggattgggcatgttcgttgtgaaaaacgaagaaatggttccggtggcaaaaactcgtgctttgtatgcacccgacacccgttttcggaatgggtgacgtgcgacaacgaaattgcgcgaaaccaccccaaacatgagttttggacctaaagtagtggattgggcatgttcgttgcgaaaaacgaagaaatggttctggtggcaaaaactcgtgctttgtatgcaccccgacacccgttttcagaatgggtgacgtgcgacaacgaaattgcgcgaaaccaccccaaacatgagttttggacctaaagtagtggattgggcatgttcgttgcgaaaaacgaagaaatggttccggtggcaaaaactcgtgctttgtatgcacccgacaaccgttttcagaatgggtgacgtgcggcaacgaaattgcacgaaaccaccccaaacatgtgttttggacctaaagtagtgcattgggcattttcgttgggaaaaacgaagaaatggttccagtggcaaaaactcgggcttttatgccccccaatacccgttttcagaatgggtgacgtgcgacaacgaaattgcgcgaaaccaccccaaacatgagttttggacctaaagtagtggattgggcatgttcgttgcgaaaaacgaagaaatggttacggtggcaaaaactcgtgctttgtatgcacccgacaccagttttcggaatgggtgacgtgcgacaacgaaattgcgcgaaaccaccccaaacatgtgttttggacctaaagtagtggattgggcatgttcgttgcgaaaaacgaataaatggttccggtggcaaaaactcgtgctttgtacgcgccccgacacccgttttccgaatgggtgacgtgcgacaacgaaattgcgcgaaaccaccccaaacatgagttttggacctaaagtagtggattgggcatgttcgttgtgaaaatcgaagaaatggttccggtggcaaaaactcgtgctttgtatgcacccgacacccgttttcggaatgggtgacgtgcgacaacgaaattgcgcgaaatcaccccaaacatgagttttggacctagagtagtggattgggcatgttcgttgtgaaaaacgaagaaatggttctggtggcaaaaactcgtcctttgtatgcacccggacaaccgttttcagaatggttgacgtgctacaacgaaattgcgcgaaaccaccccaaacatgagttttggacctaaagtagtggattgggcatgttcgttgcgaaaaacgaaaaaatggttccggtggcaaaaactcgtgctttgtatgcacccgacaaccgttttcagaatgggtgacgtgcggcaacgaaattgcgcgaaaccaccccaaacatgagttttggacctaaagtagtgcattgggcatgtttcgttgtgaaaaacgaagaaatggttccggtggcaaaaactcgtgctttgtatgcaccctgacacccgttttcagaatgggagacgtgcgacatcgaaattgtgtgaaaccaccccaaacatgagttttggacctaaagtagtggattgggcatgttcgttgcgaaaaacgaaaaaatggttccggtggcaaaaactcgtgctttgtatgcaccccgacacccgttttcaaaagggggaaggggcgccaccaaatttgcgcaaaacccccccaaacatgatttttgaaccaaaagtagggaattgggcttgtccgttgcaaaaaacaaaaaaatgtttccggtggcaaaaaactcgtcctttgtttgcccccgacaccagttttcggaatgggtgacgtgcgacaacgaaattgcgcgaaaccaccccaaacatgagttttggacctaaagtagtggattgggcatgttcgttgcgaaaaacgaataaatggttccggtggcaaaaactcgtgctttgtacgcgccccgacacccgttttcagaatgggtgacgtgcgacaacgaaattgcgcgaaaccaccccaaacatgagtttgggacctaaagtagtggattgggcatgttcgttgcgaaaatcgaagaaatggttccggtggcaaaaactcgtgctttgtatgcacccgacacccgttttcggaatgggtgacgtgcgacaacgaaattgcgcgaaatcaccccaaacatgagttttggacctagagtagtggattgggcatgttcgttgtgaaaaacgaagaaatggttacggtggcaaaaactcgtcctttgtatgcaccccgacaaccgttttcagaatggttgacgtgctacaacgaaattgcgcgaaaccaccccaaacatgagttttggacctaaagtagtggattgggcatgttcgttgcgaaaaacgaaaaaatggttccggtggcaaaaactcgtgctttgtatgcacccgacaaccgttttcagaatgggtgacgtgcggcaacgaaattgcacgaaaccaccccaaacatgtgttttggacctaaagtagtgcattgggcatgtttgttgtgaaaaacgaagaaatggttccggtggcaaaaactcgtgctttgtatgcaccctgacacccgttttcagaatgggagacgtgcgacatcgaaattgtgtgaaaccacccaaacatgagttttggacctaaagtagtggactgggcatgttcgttgcgaaaaatgaagaaatggttccggtggcaaaaactcgtgctttgtatgcaccccgacacccgttttcagaatgggtgacgcgctgcaacgaaattgcgcgaaaccaccccaaacatgagttttggacctaaagtagtggattaggcatgttcgttgcgaaaaacaaagaaatggttccggtggcaaaaactcgtgctttgtatgcacccgacacccgttttcggaatggctaacgtgcgacaacaaaattgtgcgaaaccaccccaaacatgagttttggacctaaagtagtggattgggcatgttcgttgcgaaaaacgaagaaatggttccagtggcaaaaactcgagcatttatgcaccccaatacccgttttcagaatgggtgacgtgcgacaacgaaattgcgcgaaaccaacccaaacatgagttttggacctaaagtagtggattgggcatgttcgttgcgaaaaatgaagaaatggttccggtggcaaaaactcgtgctttgtatgcaccccgacacccgttttcagaatgggtgacgcgggacaccgaaattgcgcgaaaccaccccaaacatgagttttggacctaaagtagtggattaggcatgttctttgcgaaaaacaaaaaaaatggttccggtggcaaaaacctcgtgctttgtatgcaccccgacacccgtttttcgaaattgggtgacgtgcgacaacgaaattgtgccgaaaccaccccaaacatgagttttggacctaaagtagtggatggggcatgttcgttgcgaaaacgaagaaatggttccggtggcaaaaactcgtgcttggtatgcactcgacacccgttttcggaatgggtgacgtgcgacaacgaaattgcgcgaaaccaccccaaacatgagttttggacctaaagtagtggattgggcatgttcgttgcgaaaaacgaagaaatggttcctgtggcaaaaactcgtgctttgtatgcacccccgacacccgttttcggaatgggtgacgtgcgacaacgaaattgcgcgaaaccacccgaaacatgagttttggacctaaaatagtggattgggcatattcgttgcgaaaaacgaagaaacggttccggtggcaaaaactcatgctttgtatgcaccccgacacccgttttcggaatgggtgacgtgcgacaaagaaattgtgcgaaaccaccccaaacatgagttttggacctaaagtagtggattgggcatgttcgttgcggaaaacgaagaaatggttccggtggcaaaaactcgtgcttttattgcaccccgaccaccgttttcagaatgggtgacgtgcggcaacgaaattgcgcaaaaccaccccaaacatgagttttgtacctaaagtagtggattgggcatgttcgttgcgaaaaacaaagaaatggttccggtggcaaaaactcgtgctttgtatgcacccgacacccgttttcggaataggtgacgtgcgacaacgaaattgcgcgaaaccaccccaaacatgagttttggacctaaagtagtggattgggcatgttcgttgcgaaaaacgaagaaatggttccggtggcaaaaactcgtgctttgtatgcaccccgacacccgttttcggaatgggtgacgtgcgacaacgaaattgcgcgaaaccaccccaaacatgagttttggacctaaagtagtggattgggcatgttcgttgcgaaaaacgaagaaatggttccggtggcaaaaactcgtgctttgtatgcacccgacacccgttttcggaatgggtgacgtgcggcaacgaaattgcgggaaaccaccccaaacatgagttttggacctaaagtagtggattgggcatgttcgttgcgaaaaacgaagaaatggttccggtggcaaaaactcgtgctttgtatgcacccgacacccgatttcgaaatgtgtgacgtgcgataacgaaattgcgagaaaccaccccaaacatgagttttggacctaaagtggtggattgggca

SEQ ID NO: 797 - DNA, 4210 bp, Zea mays
  source: /note="Zea mays BAC clone full insert sequence contig bacm.pk119.a23.fis34"
atgagttttggacctaaagttggcatgttcgttgccaaaaacgtagaaatggtcccagtggcaaaaactcgtgctttgtatgcaccccgacaaccgttttcagaatgggtgacgtgcggcaacgaaattgcgcaaaaccacctcaaacatgagttttggacctaaagtagtggagtgggcatattcgttgcgaaaaacgaagaaatggttccggtggcaaaaactcgtgctttgtatgcaccctgacaaccgtttttagaatgggtggcgtgcggcaacgaaattgcgcgaaaccaccccaaacatgagttttggacctaaagtagtggattgggcatgttcgttgcgaaaaacgaagaaatggttccggtggcaaaaactcgtgctttgtatgcacccgacacccgttttcggaatgggtgacgtgcggcaacgaaattgcgcgaaaccaccccaaacatgagttttggacctaaagtagtggattgggcctgttcgttgcgaaaaacaaagaaatggttccggtggcaaaaactcgtgctttgtatgcacccgacacccgttttcgaaatgtgtgacgtgcgataacgaaattgcgagaaaccaccccaaacatgagttttggacctaaagtagtggattgggcatgttcgttgcgaaaaacgaagaaatggttccggtggcaaaaactcgtgctttatatgcaccctgacaaccgttttcagaatgggtgacgtgcggcaacgaaattgcgcgaaaccaccccaaacatgagttttggacctaaagtagtggattgggcatgttcgttgcgaaaaacgaagaaacggttccggtggcaaaaactcgtgctttgtatgcacccgacaccccgtttttcggaatgggtgacgtgcgacaacgaaattgcgcgaaatcaccccaaacatgagttttggacctaaagtagtggattgggcatgttcgttgcgaaaaacgaagaaatggttccggtggcaaaaactcgtcctttgtatgcaccccgacaaccgttttcagaatggttgacgtgctacaacgaaattgcgcgaaaccaccccaaacatgagttttggacctaaagtagtggattgggcatgttcgttgcgaaaaacgaaaaaatggttccggtggcaaaaactcgtgctttgtatgcacccgacaaccgttttcagaatgggtgacgtgcggcaacgaaattgcgcgaaaccaccccaaacatgagttttggacctaaagtagtgcattgggcatgtttgttgtgaaaaacgaagaaatggttccggtggcaaaaacttgtgctttgtatgcaccctgacacccgttttcagaatgggagacgtgcgacatcgaaattgtgtgaaaccaccccaaacatgagttttggacctaaagtagtggattgggcatgttcgttgcgaaaaatgaagaaatggttccggtggcaaaaactcgtgctttgtatgcaccccgacacccgttttcagaatgggtgacgcgcggcaacgaaattgcgcgaaaccaccccaaacatgagttttggacctaaagtagtggattaggcatgttcgttgcgaaaaacaaagaaatggttccggtggcaaaaactcgtgttttgtatgcacccgacacccgttttcggaatggctaacgtgcgacaacaaaattgtgcgaaaccaccccaaacatgagttttggacctaaagtagtggattgggcatgttcgttgcgaaaaacgaagaaatggttccagtggcaaaaactcgagcatttatgcaccccaatacccgttttcagaatgggtgacgtgcgacaacgaaattgcgcgaaaccaacccaaacatgagttttggacctaaagtagtggattgggcatgttcgttgcgaaaaacgaagaaatggttacggtggcaaaaactcgtgctttgtatgcacccgacacccgttttcggaatgggtgacgtgcgacaacgaaattgcgcgaaaccaccccaaacatgtgttttggacctaaagtagtggattgggcatgttcgttgcgaaaaacgaataaatggttccggtggcaaaaactcgtgctttgtatgcgccccgacacccgttttccgaatgggtgacgtgcgacaacaaaattgcgcgaaaccaccccaaacatgagttttggacctaaagtagtggattgggcatgttcgttgtgaaaatcgaagaaatggttccggtggcaaaaactcgtgctttgtatgcacccgacacccgttttcggaatgggtgacgtgcgacaacgaaattgcgcgaaatcaccccaaacatgagttttggacctagagtagtggattgggcatgttcgttgtgaaaaacgaagaaatggttacggtggcaaaaactcgtcctttgtatgcaccccgacaaccgttttcagaatggttgacgtgcgacaacgaaattgcgcgaaaccaccccaaacatgagttttggacctaaagtagtggattgggcatgttcgttgcgaaaaacgaaaaaatggttccggtggcaaaaactcgtgctttgtatgcacccgacaaccgttttcagaatgggtgacgtgcggcaacgaaattgcgcgaaaccaccccaaacatgagttttggacctaaagtagtggattgggcatgtttgttgtgaaaaacgaagaaatggttccggtggcaaaaacttgtgctttgtatgcaccctgacacccgttttcagaatgggagacgtgcgacatcgaaattgtgtgaaaccaccccaaacatgagttttggacctaaagtagtggattgggcatgttcgttgcgaaaaatgaagaaatggttccggtggcaaaaactcgtgctttgtatgcaccccgacacccgttttcagaatgggtgacgcgcggcaacgaaattgcgcgaaaccaccccaaacatgagttttggacctaaagtagtggattaggcatgttcgttgcgaaaaacaaaaaaatggttccggtggcaaaaactcgtgttttgtatgcacccgacacccgttttcggaatggctaacgtgcgacaacgaaattgtgcgaaaccaccccaaacatgagttttggacctaaagtagtggattgggcatgttcgttgcgaaaaacgaagaaatggttccagtggcaaaaactcgagcatttatgcaccccaatacccgttttcagaatgggtgacgtgcgacaacgaaattgcgcgaaaccaacccaaacatgagttttggacctaaagtagtggattgggcatgttcgttgtgaaaaacgaagaaatggttacggtggcaaaaactcgtgctttgtatgcacccgacacccgttttcggaatgggtgaagtgcgacaacgaaaatgcgcgaaaccaccccaaacatgtgttttggacctaaagtagtggattgggcatgttcgttgtgaaaaacgaaaaaatggttccggtgggaaaaactcgtgctttgtatgcgccccgacacccgttttccgaatgggtgacgtgcgacaacgaaattgcgcgaaaccaccccaaacatgagttttggacctaaagtagtggattgggcatgttcgttgtgaaaaacgaaaaaatggttccggtggcaaaaactcgtgcttttgtatgcacccgacacccgttttctggaatgggtgatgtgcgacaacgaaattgtgcgaaacctcccccaaacatgagttttgaacctaaagtagtggattaggcatgttcgttgcgaaaaacaaaaaaatggttccggtggcaaaaactcgtgcttttatgcaccccgatacccgttttcagaatgggagacgtgcgacattgaaattgtgtgaaaccaccccaaacatgagttttggacctaaagtagtggattgggcatgttcgttgcgaaaaacgaagaaatggttccggtggcaaaaactcgtgctttgtatgcaccccgacacccgttttcagaatgggtgacgcgcggcaacgaaattgcgcgaaaccaccccaaacatgagttttggacctaaagtagtggattaggcatgttcgttgcgaaaaacaaagaaatggtttcggtcgcaaaaactcgtgctttgtatgcacctgacacccgttttcggaatggctaacgtgcgacaacgaaattgtgcgaaaccaccccaaacatgagttttggacatg

SEQ ID NO: 798 - DNA, 4061 bp, Zea mays
  source: /note="Zea mays BAC clone full insert sequence contig bacm.pk119.a23.fis35"
aaacaccaaactccgcaggtaggtcgagggtataagcattatcattaatcttggttagtatcttaaaaggaccagcagcacgaggcatcaatttagaacggcgcaaagtaggaaaacgatcctttctcaaatgcaaccaaaccatatcaccaggttcaaaagtaacatgttttcttcctttactaccagcaacctgattttttgtattagtaccagcaatgttctgtttcgtttgttcatgtatggtaatcatttgttcaacatgtgcagaagcatctacatgtggggcgttcgcagcactaagtgaaatcaaatcaataggtgccctaggaatataaccataaacaatctggaaagggcatatctttgtagaagaatgcgtggcatgattgtaagcaaattcaacatgaggcaagcaatcctcccaacgtctcaaattcttgtctaaaacagccctaagcatggtagataaagttctatttactacctcagtttgtccatcagtctgagggtgacaagtagtgctaaacaacaatttagttcccaatttattccaaagagatctccaaaaatggcttagaaacttagcatcgcgatcagagactattgtttttggaataccatgtaaacgaataatttctctaaagaacaattcagcaacaatgctagcatcatcagttttatgacaaggtataaagtgagccattttagagaatctatcaacaaccacaaaaatactatccctccccttcttagttctaggcaagcccaaaacaaagtccatagagatatcaagccaaggagaagaagggacaggcaaaggcatatacaaaccatggttgttcaaccgtgacttagctttctgacaagtagtgcagcgtgcaacaaggcgctccacatcagcgcgcatccgaggccaaaagaagtgggcagccaacacctcatgtgtcttgtagacgccaaaatgccccatgagaccgcctccatgcgcttcctgtaacaacaaaagatgaaccgagctagctggaacacacagcttgttagcgcgaaacaggaacccatcctgtatgtgaaatttgccccatggtttcccattaatacaatggccgaaagcatctttaaaatcagcatcgtcaacatattgatccttcacagtgtccaaaccaaagattttaaaatctaactgtgacagcatggtatagcgacgagacaaagcatcagcaataacattgtccttcccgttcttgtgtttaataatgtaaggaaaggactcaatgaattctacccatttagcatgacgacggttcagatttgtttgggtacgaatatgttttaaagcctcatgatcagaatggattataaactcacgatgccaaagatagtgctgccatgtatgcaaagtgcgcactaaagcgtaaagctccttatcataagtagaatatttcagaatagcaccgcttaatttttcactaaaataagcaactggttttccttcttgtaacaaaacagcacctagcccaataccgctagcatcgcattcaagctcaaacactttattaaaatcaggcaattgcaataggggagcttgggttaacttatctttcaaagtgctgaacgctacctcctgcgaatcactccaagcaaacggcacatctttctttgtaagctcatgtagaggcgctgcaatggagctaaaatcacgaacaaatctgcggtagaaaccggcaagtccaagaaagctccgaatttgtgtgaccgtcgtcggtgtaggccactcccgaatggcagcaatcttgctgctatccacctcaatgccctgcggagtaaccacataaccaagaaacgagacacgttgcgtgcaaaatgtgcacttttccatgttaccaaacaagcgagcagcacgcaaagcgtcaaaaacagcacgcaaatgttctaaatgctcctctatagacttgctgtaaataaggatatcatcgaaataaacaacaacaaacaaacctatgaaggcccgtagaacttcgttcattaaacgcaaaaaggtgctgggagcattagtcaatccaaatggcataaccaaccattcatataaaccaaatttcgttttaaaagccgttttccattcatcaccgagtttcattctaatctgatggtaaccgctacgcaaatcaaccttagagaaaataacggcaccactaagctcatctagcatatcatcaatgcgtggaataggatatcgataacgaactgtgatgttattaatagcacgacaatctacgcacatacgccatgacccatctttctttgggacgagtaaaacaggaaccgagcaagggctaagagactcacgaatgtaacccttatcaagtagcgtctgcacctggcgctggatctcctttgtctcatctggatttgtacggtacggggcgcggttcggaagagaagcgccggggatgagatcgatctgatgctcaatgccacggaggggaggaagacccggtggtaagtccgtaggataaacatcagcatactcctgcaaaaggttaacaacagcagggggtatatccaaagacggtgcatcatcaagcggaacaagcattcgcgagcatacaagtgcataacagggcatatgagcttcatggagatcatcaaaatcagcacgtgtagcaagtaaaacaggagagtgcaacttgatttcagatttaataggtgcggctgatgtcgatttgacttgttgtgcagttttagcagccctagtaagatcatctttcaaaatttggtcaggggtcattggatgtataattattttctggcctttaaacatgaaagaataatgatttgaacgaccatgatgtaaactatcagtatcatattgccaaggtcgacctaataacaaagagcatgcttccataggaataacatcgcaatcagcataatcagaataagaaccgagcgaaaaggggacacgtaccgaacgtgttacctttattttaccaccatcattaagccattgaatgtgatacggatgtggatgtgtgcgagtgggcaaggataatttctctaccaacgctgtacttgccaaattgttgcagctgccactgtcgatgatgatgcgaatcgaccgttcgtgcacgacgcccttggtatggaatagagtgtgtcgctgatttttttcggcctgggcaacctgtgtgctgagaacacgctgcacaacaagactctcatacctatcggcgtcgataggatcaacgtggacttcctcattttctgcatggttagtggcaatcatagcatgactagtttcctcagaatcactggctgaagagtactcaccattgtcacgtataagcaaggtacacttgtttgggcagtcccgaatcatatgcccaaaccctctacaacgatggcactgaatatcccgtgtacgtcctgtggaagaagcggcgcctttggcaggggcgccactggcttggtcgtccctgtgcgcgatgtagtgcaaggcgtagaaggtgcagggctggaaggagttgagctgtgtgttggatcccgacctgcaagagagttagtatatgtctttgatcgtcgtccctgcacttcacgttcagctttgcaagcatattcaaacaatgtggttatatcaaaataatccttataatcaagtatatcctgaatttccctgttcaaaccaccacgaaaacgcgccatagcagcgtcatccgactcaactaaaccacaacgaagcatacccttttgtaactcctggtaataatcctcaacagactgtgaaccttgttgaaaacgctgcattttgttaagcaaatcacgagcataataggaaggaacaaatctgtggcgcatggcagtttttaattgggtccaagtaatgacactgttaatgggaagtttttgtttatactcacgccaccaaattaaagcaaaatcagtaaattcactaatggcagccttcacttggctattagcaggaatatcatggcatgaaaatttctgttctacctctaattcccaatcaagatatgcagcaggatcatatttaccattaaaag

SEQ ID NO: 799 - DNA, 4921 bp, Zea mays
  source: /note="Zea mays BAC clone full insert sequence contig bacm.pk119.a23.fis36"
cgaaaaacgaaaaatggttccggtggcaaaaactcgtgctttgtatgcaccccgaaacccgttttcggaatgggtgacgtgcggcaacgaaattgtgtgaaaccacccaaacatgagttttggacctaaagtagtggattgggcatgttcgttgcgaaaaacgaagaaatggttccggtggcaaaaactcgtgcttttatgcaccccgatacccgttttcacaatgggtgacgtgcgacaacgaaattgcgagaaaccacctcaaacatgagttttggacctaaagtagtggattgggcatgttcgttgcgaaaaaagaagaaatggttctgctggcaaaaacttgtgcttcgtatgcaccccgacacccgttttcggaatgggtgacgtgcggcaacgaaattgcgcgaaaccaccccaaacatgagttttggacctaaagtagtggattgggcatgttcgttgagaaaaacaaagaaatggtaccggtggcaaaaactcgtgctttgtatgcacccgacacccgttttcggaatgggtgacgtgcgacaacaaaattgtgcgaaaccaccccaaacatgagttttggacctaaagtagtggattgggcatgttcgttgcgaaaaacgaagaaatggttccggtggcaaaaactcgtgctttgtatgcaccccgacacccgttttcggaatgggtgacgtgctacaacgaaattgcgcgaaacctccccaaacattagttttggacctaaagtagtggatcaggcatgttcgttgcgaaaaacgaagaaatggttctggtggcaaaaactcgtgctttgtatgcacccgacacccgtttccggaaagggtgatgtgcgacaacgaaattgtgcgaaacctccccaaacatgagttttgaacctaaagtagtggattaggcatgttcgttgcgaaaaacgaagaaatggttccggtggcaaaaactcgtgcttttatgcaccccgatacccgttttcagaatgggagacgtgcgacattgaaattgtgtgaaacgaccccaaacatgagttttggacctaaagtagtggattgggcatgttcgttgcgaaaaacgaagaaatggttccggtggcaaaaactcgtgctttgtatgcaccccgacacccgttttcagaatgggtgacgcgcggcaacgaaattgcgcgaaaccaccccaaacatgagttttggacctaaagtagtggattaggcatgttcgttgcgaaaaacaaagaaatggtttcggtcgcaaaaactcgtgctttgtatgcacctgacacccgttttcggaatggctaacgtgcgacaacgaaattgtgcgaaaccaccccaaacatgagttttggacctaaagtagtggattgggcatgttcgttgcgaaaaacgaagaaatggttccagtggcaaaaactcgtgcttttatgcaccccgatacccgttttcagaatgggtgacatgcgacaacgaaattgcgcgaaaccaacccaaacatgagttttggacctaaagttgtggattgggcatgttcgttgcgaaaaacgaagaaatggttacggtggcaaaaactcttgctttgtatgcacccgacacccgttttcggaatgggtgacgtgcgacaacgaaattgcgcgaaaccaccccaaacatgcgttttggacctaaagtagtggattgggcatgttcgttgcgaaaaacgaagaaatggttccggtggcaaaaactcgtgctttgtatgcaccccgacacccgttttcggaatgggtgacgtgcgacaacgaaattgcgcgaaaccaccccaaacatgagttttggacctaaagtagtggattgggcatgttcgttgcgaaaaacgaagaaatggttctggtggcaaaaactcgtgctttgtatgcacccgacacccgttttcggaatgggtgacgtgcgacaacgaaattgcgcgaaaccaccccaaacatgagttttggacctagagtagtggattgggcatgttcgttgtgaaaaacgaagaaatggttccggtggcaaaaactcgtgctttgtatgcaccccgacaaccgttttcagaatggttgacgtgctacaacgaaattgcgcgaaaccaccccaaacatgagttttggacctaaagtagtggattgggcatgttcgtttcgaaaaacgaaaaaatggttccggtggcaaaaactcgtgctttgtatgcacccgacacccgttttcggaatgggtgacgtgcggcaacgaaattgtgcgaaaccacccaaacatgagttttggacctaaagtagtggattgggcatgttcgttgcgaaaaacgaagaaatggttccggtggcaaaaactcgtgcttttatgcaccctgatacccgttttcagaatgggtgacgtgcgacaacgaaattgcgagaaaccacctcaaacatgagttttggacctaaagtagtggattgggcatgttcgttgcgcaaaacgaagaaatagttttggtggcaaaaactcgtgctttgtatgcaccccgacacccgttttcggaatgggtgacgtgcgacaacgaaattgcgcaaaaccaccccaaacatgagttttggacctaaagtagtggattgggcatgttcgttgagaaaaacgaagaaatggttccagtggcaaaaactcgtgctttgtatgcacccgacacccgttttcggaatgggtgacgtgcgacaataaaattgtgtgaaaccaccccaaacatgagttttgaacctaaagtagtggattgggcatgttcgttgcgaaaaacgaagaaatggttccggtggcaaaaactcgtgctttgtatgcaccccgacacccgttttttggaatgggtgacgtgctacaacgaaattgcgcgaaacctccccaaacatgagttttggacctaaagtagtggattaggcatgttcagtgcgaaaaacgaagaaatggttctggtggcaaaaactcgtgctttgtatgcacccgacacccgttttcggaatgggtgatgtgcgacaacgaaattgtgcgaaacctccccaaacatgagttttgaacctaaagtagtggattaggcatgttcgttgcgaaaaacgaagaaatggttccggtggcaaaaactcgtgcttttatgcaccccgatacccgttttcagaatgggagacgtgcgacatcgaaattgtgtgaaaccacaccaaacatgagttttggacctaaagtagtggattgggcatgttcgttgcgaaaagcgaagaaatggttccggtggcaaaaactcgtgctttgtatgcaccccgacaaccgttttcagaatgggtgacgtgcggcaacgaaattgcgcgaaaccaccccaaacatgagttttggacctaaagtagtgcattgggcatgtttgttgtgaaaaacgaagaaatggttccgatggcaaaaactcgtgctttgtatggaccccgacacccgttttcagaatgggagacgtgcgacatcgaaattgtgtgaaaccaccccaaacatgagttttggacctaaagtagtggattgggcatgttcgttgcgaaaaatgaagaaatggttccggtggcaaaaactcgtgctttgtatgcaccccgacacccgttttcagaatgggtgacgcgcgacaacgaaattgcgcgaaaccaccccaaacatgagttttggacctaaagtagtggattaggcatgttcgttgcgaaaaacgaagaaatggttccggtggcaaaaactcgtgctttgtatgcacccgacacccgttttcggaatgggtgacgtgcgactacgaaattgtgcgaaaccaccccaaacatgagttttggacctaaagtagtggattgggcatgttcgttgcgaaaaacgaagaaatggttccggtggcaaaaactcgtgctttgtacgcgccccaatacccgttttcggaatgggtgacgtgcgacaataaaattgcgcgaaaccaccccaaacatgagttttggacctaaagtagtggattgggcatgttcgttgtgaaaaacgaagaaatggttccggtggcaaaaactcgtgctttgtatgcacccgacacccgttttcggaatgggtgacgtgcgacaacgaaattgcgcgaaaccaccccaaacatgagttttggacctaaagtagtggattgggcatgttcgttgtgaaaaacgaagaaatggttacggtggcaaaaactcgtcctttgtatgcaccccgacaaccgttttcagaatggttgacgtgcgacaacgaaattgcgcgaaaccaccccaaacatgagttttggacctaaagtagtggattgggcatctttgttgcgaaaaacgaaaaaatggttccggtggcaaaaactcgtgttttgtatgcacccgacacccgttttcggaatgggtgacgtgcgacaaggaaattgcgagaaaccaccccaaacatgagttttggacctaaagtagtggattgggcatgttcgttgcgaaaaacgaagaaatggttccggtggcaaaaactcgtgctttgtatgcaccccgacacctgttttcgaaatgggtgacgtgcaacaacaaaattgcgagaaaccaccccaaacttgagttttggacctaaagtagtggattgggcatgttcgttgcgaaaaacgaagaaatggttcgggtggcaaaaactcgtgtttttatgcacccgacacccgttttcggaatgggtgacgtgcggcaacgaaattgcgcgaaaccaccccaaacatgagttttgtacctaaagtagtggattgggcatgttcgttgcgaaaaacgaagaaatggttccggtggcaaaaactcgtgctttgtactgataaccgttttcagaatgggtgacgcgcggcaacgaaattgcgcgaaaccacccaa

SEQ ID NO: 800 - DNA, 5596 bp, Zea mays
  source: /note="Zea mays BAC clone full insert sequence contig bacm.pk119.a23.fis37"
atggtgcttgctgcagttacgaattcctcggactggtggagtcaagaagttctctcgacagtttctggacgccctcatttggtatctctaattgattctttctcccaccaagaagtagacgaagagtgctttccatcaagtgcttatttgccttcattggccttgggagttgaaagatatgacctcttcaacttgcacttgctgcagttacgaaatcccttcaagtggagcagcttttattgccttgttgccttctcaaattctagatggtttacctcccaaacaccttagcataataaagtaatcacaaggtattaatacctcatttaaggaatgattagcttcaacaacaaggaacgagttcacctgataattaaatttacgtgcacggactcgtttcactggtccatgattaaatggtgaagggggtcgctggtgtggttgtattgatggcagtgatgtcctcatcatcctccccttcttttaatagagtcgtcctcgactctagtgtgtgctcctcacccaagtatatctttaaatttgatgatgtgcttgcttggttggaaatgttggaaatatcattacttggtccccaatcaacttctttgttcctcaatgtctttgtagcaggagccattaacatggccatatctgtgcgggttatgttctcatcattctccccttcttgacagcaaaccgtcctcggttttgcatcatgattgatgttgatgactaagcttttatcaatgtctttcaaatataaacttgaaacttctactaaagtacatggaaacaagagattcttttcttcttgagaacataccaatatcttatttgcaaaaagtgaagaaacaacatatctagatgaaatagaaattctatgcacaagaaattgtcctatgttgttgtacttgccagcaatgtaaaatataacatgagaaggacaaggtatagttgatctagcaaataaaatattttccaaattaccgagctcaaaaagatcatcaaactcaatatatccccaagtatttaaagaagagagcaaatttatttcttcagtttcgtttgcaatacaaattacatgttcctttttagccaaaatgtttggttcaataacagatgtaacatgatcatttactagttgttgccttagtacatgtgaatcattataccacaaatcttcactatcacaagtgtcagcaatcaattcttcttgtgatgatggaaaaacaatagctggtttcattattttgtgttcttgatcagcatgtagagcagatgcaaaagaggaactatggctcacatgttcagtgcttgtataattatataatagaatctcattttcagctttacatgcaagcaaaaacaagtgagaaatgtgtttgtatgcttcatgcatgactatagtctgaatttcagaattgagtcctttcatgaacctagtcattacatcttccatgcattcatctaaacgagcaaacatggtacaaattttaaaatcataataataatctatcacagtcctagcaccctgctttaaggtgtctaatttagaaagcaaatgatcagaatagtatgcaggaatgaatgcatctctaaaatgaagtttgaagtcttcccaagattgtggaactttgttgtgcctacaaatgtgtttccattccatcaatgcgtgctcagttaacaaattagaggcaatataaatcttttgtttttgagatagatcatgcttatcaaattcattatctacctttagctcccaatcaatgtatgcatgaggatcgaatttaccggcatatgaaggtaagtgtcgaatgatgccttgaatataatgttcagttggctcaaaaatctccatatcacctgccatgtttagtaaagacaagaaaacaataaaaatatctttgatcctataaactactaggatttattgttgtaatctctcattctcaaactggttaagcaagttcttacaaattctcaccacgcaatacaggaggtgccagcaaacagcaagaataacaacaacggtggcagctagcacaacctggtggtgttgtagaaaaatttgtggatttataggtagctgcaatttcaatagttccaaggaatagctagtaccacgttagccacaacaagttgaataaacgttctacaatggtgttgtgctggtcctagtccaaaccgtaatagagacgcgagccgttacacaaatagtatcaccaaaaggtcagaacagcaatcggatttttgaaactataaaaagaaggcacacaaactgccttttgttttgttgcacttacaaattttatctaccaaaattcagaactggttttttctctctctcttttttgcacgtgtctttttttattttgctgattagtgcggctttttttatgcactcgccttttgctttctcttctttttggttgaattgcagcaagaggtctaaactggtgattgtaacaaggtggcgcgaactcgaaactctagcggtaagaaaactttagaccagcaactcgacccaaatgcagcaaccgtgaattcaacaagtcgaaaactaagtagtaaagcaaaggctcaaactgtttttaggtgaatttctgctctaaatatatctttgggcaaaagtggactgtaggtaaataaaacaaggaagattgagatctctcaccgagcaacctgaaatttgataccacttgataacccaacgggtagaagggtgcccgatctttcgatgagagatgatggaggtggaaaacttgttggagaacgaccttggctgcccgactaccacaaccaagatggtgtggcgccttgagcgacaggtacaccgtctcctggtaactacgatttggggtggaggtcgacgttgtgctatccgactacaacaaccacaagggtgctgcgccttagcgatagttacaccggctcctgttgttgttgctcttgccgtgccaagaacaaccttgaacctgcaagcaatcgagaacaagcaagaacaagataaaaagcagacgctcacggatctgatagagttggggttctgtttcaagtatccgggtggtctagccgacacacgcgtttacaaggaagtagcaaaggctaaacttacatcaaacaaaaacccaagttctttggtggctgctagttgcttaaatagaggaatagaaagaagttctggtggagaacgaagctctctcgacagtttctggacgtgtcgtttggtttctcccattgattcttcagccgccagaaagtagacgaagagagctttccaacaagtacttatttgactaaacaatcttgggagatgaaagatatgctccatttaatatggtgcttgctgcagttacgaattccctcggactggtggagtcaagaagttctctcgacagtttctggacgcctcatttggtatctctaattgattctttctccaccaagaagtagacgaagagtgctttccatcaaatgcttatttgccttcattggccttgggagttgaaagatatggcctcttcaacttgcacttgctgcagttacgaaatcccttcaagtggagcagcttttattgccttgttgccttctcaaattctagatggtttacctcccaaacaccttagcataataaagtaatcacaaggtattaatacctcatttaaggaatgattagcttcaacaacaaggaacgagttcacctgataattaaatttacgtgcacggactcgtttcactggtccatgattaaatggtgaagggggtcgctggtgtggttgtattgatggcagtgatgtcctcatcatcctccccttcttttaatagagtcgtcctcgactctagtgtgtgctcctcacccaagtatatctttaaatttgatgatgtgcttgcttggttggaaatgttggaaatatcattacttggtccccaatcaacttctttgttcctcaatgtctttgtagcaggagccattaacatggccatatctgtgcgggttatgttctcatcactaaagtagtggattgggcatattcgttgcgaaaaacgaagagatgattccggtggcaaaaactcgtgctttgtatgcacccgacacccgttttcggaatgggtgacgtgctacaacgaaattgcgcgaaaccaccccaaacatgagttttggacctaaagtagtggattgggcatgttcgtcgcaaaaacgaagaaatggttccagtggcaaaaactcgtgctttgtatgcaccccgacaaccgttttcagaatgggtgacgcgcgacaacgaaattgcgcgaaaccaccccaaacatgagttttggacctaaagtagtggattgggcatgttcgttgcgaaaaacgaaaaaatggttccggtggtaaaaactcgtgctttgtatgcacccgacacccgttttcggaatgggtgacgtgcgacaacgaaattgtgtgaaaccaccccaaacatgagttttggacctaaagtagtggattggacatgttcgttgtgaaaaacgaagaaatggttccggtggcaaaaactcgtgcttttatgcacctcgatacccgttttcagaatgggtgacgtgcgacaacgaaattgcgcgaaaccacctcaaacatgagttttggacccaaagtagtggattgggcatgtttgtagcgaaaaacaaagaaatggttccggtggcaaaaactcgtgctttgtatgcaccccgacacccgttttctgaatgggtgacgtgtgacaacgaaattgtgcgaaaccacccaaacatgagttttggacctaaagtagtggattgggcatgttcgttgcgaaaaacaaagaaatggttccggtggcaaaaactcgtgctttgtatggacccgacacccgttttcggaatgggcgacgtgcgacaaaaattgtgcgaaaccaccccaaacatgagttttggacctaaatagtggattgggcatgttcgttgcgaaaaacgaagaaatggttccggtggcaaaaactcgtgcttttatgcaccccgatacccgttttcagaatgggtgacgtgcgacaacgaaattgcgcgaaaccacctcaaacatgagttttggacctaaagtagtggattgggcatttttgttgcgaaaaacaaagaaatggttccgctggcaaaaactcgtgctttgtatgcaccccgacacccgttttcggaatgggtgacgtgcgactacgaaattgtgcgaaaccaccccaaacatgagttttggacctaaagtagtggattgggcatgttcgttgcgaaaaacgaagaaatggttccggtggcaaaaactcgtgctttgtatgcacccgacacccgttttcggaatgggtgacgtgcgacaacgaaattgcgcgaaaccaccccaaacatgagttttggacctaaagtagtggattgggcatgtttgttgcgaaaacgaagaaatggttccggtggcaaaaactcgtgctttgtatgcaccccgacaaccgttttcagaatggttgacttgcgacaacgaaattacgcgaaaccaccccaaacatgagttttggacataaagtagtggattgggcaatttcgttgcgaaaaacga

SEQ ID NO: 801 - DNA, 2660 bp, Zea mays
  source: /note="Zea mays BAC clone full insert sequence contig bacm.pk119.a23.fis38"
ccctaaaccctaaaccctaaaccctaaaccctaaaccctaaaccctaaaccctaaaccctaaaccctaaaccctaaaccctaaaccctaaaccctaaaccctaaaccctaaaccctaaaccctaaaccctaaaccctaaaccctaaaccctaaaccctaaaccctaaaccctaaaccctaagggcgaattcgatatcaagctggccgctcgagctataactatgactctcttaaggtagccaaatgctgcagactagtaattacacataacacacaactttgatgcccacattatagtgattagcatgtcactatgtgtgcatccttttatttcatacattaattaagttggccaatccagaagatggacaagtctaggttgcggccggccgctacaggaacaggtggtggcggccctcggtgcgctcgtactgctccacgatggtgtagtcctcgttgtgggaggtgatgtccagcttggcgtccacgtagtagtagccgggcagctgcacgggcttcttggccatgtagatggacttgaactccaccaggtagtggccgccgtccttcagcttcagggccttgtgggtctcgcccttcagcacgccgtcgcgggggtacaggcgctcggtggaggcctcccagcccatggtcttcttctgcatcacggggccgtcggaggggaagttcacgccgatgaacttcaccttgtagatgaagcagccgtcctgcagggaggagtcctgggtcacggtcgccacgccgccgtcctcgaagttcatcacgcgctcccacttgaagccctcggggaaggacagcttcttgtagtcggggatgtcggcggggtgcttcacgtacaccttggagccgtactggaactggggggacaggatgtcccaggcgaagggcagggggccgcccttggtcaccttcagcttcacggtgttgtggccctcgtaggggcggccctcgccctcgccctcgatctcgaactcgtggccgttcacggtgccctccatgcgcaccttgaagcgcatgaactcggtgatgacgttctcggaggaggccatggtggcgaccggtggatccatctgcgtcaccgggcgcaccgggcgcggcggggccggcagctcgaagtcgcgctgccagaagccgacgtcgtgccagccgccgtgcttgtagccggcggcgcggagggtgccgcgggcggtgtagccgagggcctcgtggaggcgcacggacgggtcgttcgggaggccgatcacggccaccacggacttgaagccctgggcctccatgctcttgaggaggtgggtgtagagggtggagccgaggccgaggcgctggtggcggtgggacacgtacacggtggactccacggtccagtcgtaggcgttgcgggccttccacgggccggcgtaggcgatgccggccaccacgccctccacctcggccacgagccacgggtagcggtcctggaggcgctccaggtcgtcgatccactcctgcggggtctgcggctcggtgcggaagttcacggtggaggtctcgatgtagtggttcacgatgtcgcacacggcggccatgtcggcggcggtggccgggcggatctcgacggggcggcgctcgggggacatggtgtcgtgtggatccccggcggtcgacctgcagaagtaacaccaaacaacagggtgagcatcgacaaaagaaacagtaccaagcaaataaatagcgtatgaaggcagggctaaaaaaatccacatatagctgctgcatatgccatcatccaagtatatcaagatcaaaataattataaaacatacttgtttattataatagataggtactcaaggttagagcatatgaatagatgctgcatatgccatcatgtatatgcatcagtaaaacccacatcaacatgtatacctatcctagatcgatatttccatccatcttaaactcgtaactatgaagatgtatgacacacacatacagttccaaaattaataaatacaccaggtagtttgaaacagtattctactccgatctagaacgaatgaacgaccgcccaaccacaccacatcatcacaaccaagcgaacaaaaagcatctctgtatatgcatcagtaaaacccgcatcaacatgtatacctatcctagatcgatatttccatccatcatcttcaattcgtaactatgaatatgtatggcacacacatacagatccaaaattaataaatccaccaggtagtttgaaacagaattctactccgatctagaacgaccgcccaaccagaccacatcatcacaaccaagacaaaaaaaagcatgaaaagatgacccgacaaacaagtgcacggcatatattgaaataaaggaaaagggcaaaccaaaccctatgcaacgaaacaaaaaaaatcatgaaatcgatcccgtctgcggaacggctagagccatcccaggattccccaaagagaaacactggcaagttagcaatcagaacgtgtctgacgtacaggtcgcatccgtgtacgaacgctagcagcacggatctaacacaaacacggatctaacacaaacatgaacagaagtagaactaccgggccctaaccatggaccggaacgccgatctagagaaggtagagagggggggggggggg

SEQ ID NO: 802 - DNA, 8067 bp, Zea mays
  source: /note="Zea mays BAC clone full insert sequence contig bacm.pk119.a23.fis39"
ctcactactttgggtccaaaactcatgtttgaggtggtttcccgcaatttcgttgtcgcacgtcacccattctgaaaacgggtatcggggtgcataaaagcacgagtttttgccaccggaaccatttcttcgtttttcacaacgaacatgtccaatccactactttaggtccaaaactcatgtttggggtggtttctcacaatttcgttgtcgcacgtcacccattccgaaaacgggtgtcgggtgcacacaaagcacgagtttttaccaccggaaccattttttcgtttttcgcaacgaacatgcccaatccactactttaggtccaaaactcatgtttggggtggtttcgcgcaatttcgttgccgcacgtcacccattctgaaaacggttgtcggggtgcatacaaagcacgagtttttgccaccggaaccatttcttcgtttttcgcaacgaacatgcccaatccactactttaggtccaaaactcatgtttggggtggtttcgcgcaatttcgttgtagcacgtcacccattccgaaaacgggtgtcgggtgcatacaaagcacgagtttttgccaccggaatcatctattcgtttttcgcaacgaacatgcccaatccactactttaggtccaaaactcatgtttggggtggtttcgcgcaatttcgttgtcgcacgtcacccattccgaaaacgggtgtcgggtgcatacaaagcacgagtttttgccaccaaaacaatttctttgtttgtcgcaacgaacatgcccaatccactactttaggtcaaaaactcatgtttggggtggtttcacgcaatttcgttgccgcacgtcacccattctgaaaacgggtgtcggggtgcatacaaagcacgagtttttgccaccggaaccatttcttcatttttcgcaacaaacatgcccaatccactactttagatccaaaactcatgtttggggtggtttcgcgcaatttcgttgtcacacgtcgcccgttccgaaaacgggtgtcgggtgcatacaaagcacgagtttttgccaccggaaccatttcttcgttttcgcaacaaacatgcccaatccactactttaggtccaaaactcatgtttggggtggtttcgcgcaatttcgttgtcgcacgtcacccattccgaaaacgggtgtcgggtgcatacaaagcacgagtttttgccaccggaaccatttcttcgtttttcgcaacgaacatgcccaatccactactttaggtccaaaactcatgtttggggtggtttcgcacaatttcgtagtcgcacgtcacccattccgaaaacgggtgtcggggtgcatacaaagtacgagtttttgccagcggaaccatttctttgtttttcgcaacaaaaatgcccaatccactactttaggtccaaaactcatgtttgaggtggtttcgcgcaatttcgttgtcgcacgtcacccattctgaaaacgggtatcggggtgcataaaagcacgagtttttgccaccggaaccatttcttcgtttttcgcaacgaacatgcccaatccactatttaggtccaaaactcatgtttggggtggtttcgcacaatttttgtcgcacgtcacccattccgaaaacgggtgtcgggtccatacaaagcacgagtttttgccaccggaaccatttctttgtttttcgcaacgaacatgcccaatccactactttaggtccaaaactcatgttttgggtggtttcgcgcaatttcgttgccgcgcgtcacccattctgaaaacggttatcagtacaaagcacgagtttttgccaccggaaccatttcttcgtttttcgcaacgaacatgcccaatccactactttaggtacaaaactcatgtttggggtggtttcgcgcaatttcgttgccgcacgtcacccattccgaaaacgggtgtcgggtgcataaaagcacgagtttttgccaccggaaccatttcttcgtttttcgcaacgaacatgcccaatccactactttaggtccaaaactcatgtttggggtggtttctcgcaattttgttgttgcacgtcacccatttcgaaaacaggtgtcgggctgcatacaaagcacgagtttttgccaccggaaccatttcttcgtttttcgcaacgaacatgcccaatccactactttaggtccaaaactcatgtttggggtggtttctcgcaatttcgttgtcgcacgtcacccattccgagaacgggtgtcgggtgcatacaaagcacgagtttttgccacggaaccatttcttcgtttttcgcaacaaacatgcccaatccactactttagctccaaaactcatgtttggggtggtttcgcgcaatttcgttgccgcacgtcacccattccgaaaacgggtgtcggggtgcatacaaagcacgacattttgccaccggaaccatttcttcgtttttcgcaacgaatatgcccaatccactactttaggtccaaaactcatgtttgaggtggtttcgcgcaatttcgttgtcgcacgtcacccattccgaaaactagtgttggggtgcatacaaagcacgagtttttgccaccggaaccatttcttcgtttttcgcaacgaacatgcccaatccactactttaggtccaaaactcatgtttggggtggtttcgcgcaatttcgttgccgcacgtcacccattctaaaaacggttgtcagggtgcatacaaagcacgcgtttttgccaccgaaaccatttcttcgtttttcgcaacgaacatgcccactccactactttaggtccaaaactcatgtttgaggtagttttgcgcaatttcgttgccgcacgtcacccattctgaaaacggttgtcggggtcatacaaagcacaagtttttgccaccggaaccatttcttcgtttttggcaacgaacatgcccaatccactactttaggtccaaaactcatgtttggggtggtttcgcacaatttcgttttcgcacgtcacccattccgaaaacaggtgtggggtgcatacaaagcacgagtttttgccaccagaaccatttctttgtttgtcgcaacgaacatgcccaatccactactttaggtcaaaaactcatgtttggggtggtttcacgcaatttcgttatcgcacgtcacacattctgaaatcgggtgtcgggtgcatacaaagcacgagtttttgctaccggaaccgtttcttcgtttttcgcaacgaacaggcccaatccactactttaggtccaaaactcatgtttggggtggtttctcgcaatttcgttatcgcacgtcacacattacgaaaacgggtgtcgggtgcatacaaagcacgagtttttgccgccggaaccatttcttcgtttttggcaacgaacatgcccaatccactaatttaggtccaaaactcatgtttggggtggtttcgcgcaatttcgttgtcgcacgtcacccattccgaaaacgggtgtcgggtgcatagaaagcacgagtttttgccaccggaaccgtttcattgtttttcgcaacgaatatacccaatccactactttaggtccaaaactcatgtttgaggtggtttcgcgcaatttcgttgtcgcacgtcacccattccgaaaactagtgtcggggtgcatacaaagcacgagtttttgccaccggaaccatttcttcgtttttcgcaacgaacatgcccaatccactactttaggtccaaaactcatgtttggggtggtttcgcgcaatttcgttgtcgtacgtcacccattccgaaaacaggtgtcgggtgcatacaaagcacgagtttttgccaccggaaccatttcttcgtttttcgcaacaaacatgcccaatccactactttaggtacaaaactcatgtttggggtggtttcgcgcaatttcgttgccgcacgtcacccattctgaaaacggttgtcggggtgcaataaaagcacgagtttttgccaccggaaccatttcttcgttttccgcaacgaacatgcccaatccactactttaggtccaaaactcatgtttggggtggtttcgcacaatttcgttgtcgcacgtcacccattccgaaaacgggtgtcggggtgcatacaaagcacgagtttttgccagcggaaccatttctttgtttttcgcaacaaaaatgcccaatccactactttaggtccaaaactcatgtttcgggtggtttcgcacaatttcgttgtcgcacgtcacccattctgaaaacgggtatcggggtgcataaaaaagcacgagtttttgccatcggaaccatttcttcttttttcgcaacgaaaatgcccaatccactactttaggtccaaaactcatgtttcgggtggtttcacacaatttcgttgtcgcacgtcacccattccgaaaacgggtgtcgggtgcatacaaagcacgagtttttgccaccggaaccattttttcttttttcgcaacgaacatgcccaatccacaactttaggtccaaaactcatgtttgaggtggtttcgcgcaatttcgtttccgcacgtctcccattttgaaaacgggtgtgggggagcatacaaagcacgagtttttgccacctgtatcatttcttcgtttttcgcaacgcacatgcccaatccactactttagatccaaaactcatgtttgaggtggttacgcgcaatttcgttgtcgcacgtcacccattctagaaacgggtatgcataaaagcacgagtttttgccaccggaaccatttcttcgtttttcgcaacgaacatgcccaatccactactttaggtccaaaactcatgtttgtggtggtttcgcacaatttcgttgtcgcacgtcacccattccgaaaacaggtgtcgggtgcatacaaagcacgagtttttgccaccggaaccatttctttgtttttcgcaacgaacatgcccaatccactactttaggtctaaaactcatgtttggggtggtttcacgcaatttcgttgctgcacgtcacccattctgaaaacgggtgtcggggtgcatacagagcacgagtttttgccaccggaaccatttcttcgtttttcgcaacgaacatgcccaatccactactttaggtccaaaactcatgtttggggtggtttcgcgcaatttcgttgtcgcacgtcgcccgttccaaaaacgggtgttgggtgcatacaaagcacaagtttttgccaccggaaccatttcttcgtttttcgcaacgaacatgcccaatccactatttaggtccaaaactcatgtttggggtggtttcgcacaatttcgttgtcgcacgtcacccattccgaaaacgggtgtcgggtgcatacaaagcacgagtttttgccaccggaaccatttctttgtttttcgcaacgaacatgcccaatccactagtttaggaccaaaactcatgtttgggtggtttcgcacaatttcgttgccgcacttcacccattctgaaaacgggtgtgggggtgcatacaaagcacgagtttttgccaccggaaccatttcttcgtttttcgcaacgaacatgcccaatccactactttaggtccaaaactcatgtttggggtggtttcgcacaatttcgttgtcgcacatcacccattccgaaaataggtgtcgggtgcatacaaagcacgagtttttgccaccggaaccatttctttgtttttcgcaacgaacatgcccaatccactactttaggtctaaaactaatgtttggggtggtttcacgcaatttcgttgccgcacgtcacccattctgaaaacgggtgtcggggtgcatacaaagcacgagtttttgccaccggaaccatttcttcatctttcgcaacgaacatgcccaatccactactttagatccaaaactcatgtttggggtggtttcgcgcaatttcgttgtcgcacgtcgcccgttccgaaaacgggtgtcgggtgcatacaaagcacaagtttttgccaccggaaccatttcttcgttttttcgcaacgaacttgcccaatccagtactttatgtccaaaactcatgtttggggtggtttcgcgtaatttcgttgccacagttcaaccattctgaaaacggttgtcggggtgcatacaaagcacgagtttttccccccggaaccatttttttgttttcgcaatgaacatgcccaatccactactttaggtctaaaactcatgtttgggatggtttcgcgcaatttcgttgtcgcacgtcacccattccaaaaacgggtgttgggtgcatacaaagcacgagtttttgccaccggaaccattttttcatttttcgcaacgaacatgcccaatccactactttaggtccaaaactcatgtttggggtggtttcgcacaatttcgttgtcgcacgtcacccattccgaaaacgggtgtcggggtgcatacaaagcacgagtttttgccagcggaaccatttttttgtttttcgcaacaaaaatgcccaatccactactttaggtccaaaactcatgtttggggtggtttcgcgcaatttcgttgtcgcacgccacccattctgaaaacgggtatcggggtgcataaaagcacgagtttttgccaccggaaccatttcttcgtttttcgcaacgaacatgcccaatccactatttaggtccaaaactcatgtttggggtggtttcgcacaatttttgtcgcacgtcgcccattccgaaaacaggtgtcgggtccagacaaagcacgagtttttgccaccggaaccatttctttgtttttcgcaacgaacatgcccaatccactactttaggtccaaaactcatgtttgggtggtttcgcacaatttcgttgtcgcacgtcacccattccgaaaacgggtgtcggggtgcatacaaagcacgagtttttgccaccggaaccatttctttgtttttcgctacaaacatgcccaatccactactttgggtccaaaactcatgtttgaggtggtttcgcgcaatttcgttgtcgcacgtcacccattctgaaaacgggtatcagggtgcataaaagcacgagtttttgccaccggaaccatttcttcgtttttcgcaacgaacatgcccaatccactactttaggtccaaaactcatgtttggggtggtttcacacaatttcgttgtcacaccacacctcactcaatcccaaaacgggtgacgggtggatacaaagcattattttttaccaccggaaccattttttcgtttttcgcaacgaacatgcccaatccactactttaggtccaaaactcatgtttggggtggtttcgcgcaatttcgttgccgcacgtcacccattctgaaaacggttgtcggggtgcatacaaagcacgagtttttgccaccggaaccatttcttcgtttttcgcaacgaaaatgcccaatccactactttaggtccaaaactcttgtttggggtggtttcgcgcaatttcgttgtagcacgtcacccattccaaaaacgggtgtcgggggcaaacaaagcacgagtttttgccaccggaatcatttcttcgtttttcacaacgaaaatgcccaatccactcctttaggtccaaaactcatgtttggggtggtttcgcgcaaatttatttgtcgaacgtcccccattcggaaaacgggtgtcggggggcatacaaagcacgagtttttgccaccggaaccattttttcgtttttcgcaacgaacatgcccaatccactactttaggtccaaaacacatgtttggggtggtttcgcgcaatttcgttgtcgcacgtcacccattccgaaaacgggtgtcgggtgcatacaaagcacgagtttttgccaccgtaaccatttcttcgtttttcgcaacgaacatgcccaatccactactttaggtccaaaactcatgtttgggttggtttcgcgcaatttcgttgtcgcacgtcacccattctgaaaacgggtattggggtgcataaatgctcgagtttttgccactggaaccatttcttcgtttttcacaacgaacctcgctcatcg

SEQ ID NO: 803 - DNA, 6853 bp, Zea mays
  source: /note="Zea mays BAC clone full insert sequence contig bacm.pk119.a23.fis40"
aagtagtggattggggcatgtttgttgccaaaaaaagaagaaatgtgtttcggtgcaaaaaatcgtgctttgtatgcaccccgacaacccttttcggaatgggtgacgtgcggcaacgaaaatgcgcgaaaccacctccaacatgagttttggacctaaagtagtggagtgggcatgttcgttgcgaaaaacgaagaaatggtttccgtggcaaaaactcgtgctttgtatgccccccgacaaccgtttttggaatgggtgacgtgcggcaacgaaattgcgcgaaaccaccctaatcatgagttttggacctaaagtagtggattgggcatgttcgttgcgaaaaacgaagaaatggttccggtggcaaaaactcgtgctttgtatgcaccccgacactagttttcggaatgggtgacgtgcgacaacgaaattgcgcgaaaccacctcaaacatgagttttggacctaaagtagtggattgggcatattcgttgcgaaaaacgaagaaatggttccggtggcaaaaactcgtgctttgtatgcacccgacacccgttttcggaatgggtgacgtgcggcaacgaaattgcgggaaaccaccccaaacatgagttttggacctaaagtagtggattgggcctgttcgttgcgaaaaacgaagaaatggttccggtggcaaaaactcgtgctttgtatgcacccgacacccgatttcgaaatgtgtgacgtgcgataacgaaattgcgagaaaccaccccaaacatgagttttggacctaaagtggtggattgggcatgttcgttgtgaaaaacgaagaaatggtttcggtggcaaaaactcgtgctttgtatgcactccacacccgttttctgaatgggtgacgtgcgacaacgaaattgcgcgaaaccaccccaaacatgagttttggacctaaagtagtggattgggcatgttcgttgcgaaaaacgaaagaaatggttcctgtggcaaaaactcgtgctttgtatgcaccccgacacccgttttcggaatggttgacgtgcgacaacgaaattgcgcgaaacccccccaaacatgagttttggacctaaaatagtggattgggcatattcgttgcgaaaaacgaagaaacggttccggtggcaaaaactcatgctttgtatgcaccccgacacccgttttcggaatgggtgacgtgcgacaaagaaattgcgcgaaaccaccccaaacatgagttttggacctaaagtagtggattgggcatgttcgttgcggaaaacgaagaaatggttccggtggcaaaaactcgtgcttttattgcaccccgacaaccgttttcagaatgggtgacgtgcggcaacgaaattgcgcaaaaccaccccaaacatgagttttgtacctaaagtagtggattgggcatgtttgttgcgaaaaacgaagaaatggttccggtggcaaaaactcgtgctttgtatgcacccgacacctgttttcggaataggtgacgtacgacaacgaaattgcgcgaaaccaccccaaacatgagttttggacctaaagtagtggattgggcatgttcgttgcgaaaaacgaagaaatggttccggtggcaaaaactcgtgctttgtatgcaccccgacactagttttcggaatgggtgacgtgcgacaacgaaattgcgcgaaaccacctcaaacatgagttttggacctaaagtagtggattgggcatattcgttgcgaaaaacaatgaaacggttccggtggcaaaaactcgtgctttgtatgcacccgacacccgttttcggaatgggtgacgtgcgacaacgaaattacgcgaaaccaccccaaacatgagttttggacctaaattagtggattgggcatgttcgttgccaaaaacgaagaaatggttccggtggcaaaaactcgtgctttgtatgcaccccgacacaccctttttcgaaatgtgtgacgtgcgataacgaaattgcgagaaaccaccccaaacatgagttttggacctaaagtagtggattgggcctgttcgttgcgaaaaacgaagaaacggttccggtagcaaaaactcgtgctctgtatgcacccgacacccgttttcgaaatgtgtgacgtgcgataacgaaattgcgagaaaccaccccaaacatgagttttggacctaaagtagtggattgggcatgttcattgcgaaaaacgaagaaatggttccggtggcaaaaactcgtgctttgtatgcaccccacacccgttttcggaatgggtgacgtgcgacaacgaaattgcgcgaaaccaccccaaacatgagttttggacctaaagtagtggattgggcatgttcgttgccaaaaacgaagaaatggttccggtggcaaaaactcgtgctttgtatgcaccccgacaaccgttttcagaatgggtgacgtgcggcaacgaaattgcgcaaaactacctcaaacatgagttttggacctaaagtagtggagtgggcatgttcattgcgaaaaacgaagaaatggtttcggtggcaaaaacgcgtgctttgtatgcaccctgacaaccgtttttagaatgggtgacgtgcggcaacgaaattgcgcgaaaccaccctaatcatgagttttggacctaaagtagtggattgggcatgttcgttgcgaaaaacgaagaaatggttccggtggcaaaaactcgtgctttgtatgcaccccgacactagttttcggaatgggtgacgtgcgacaacgaaattgcgcgaaaccacctcaaacatgagttttggacctaaagtagtggattgggcatattcgttgcgaaaaacgaagaaatggttccggtggcaaaaagttgtgctttgtatgcacccgacacccgttttcggaatgggtgacgtgcggcaacgaaattgcaggaaaccaccccagacatgagttttggacctaaagtagtggattgggcctgttcgttgcgaaaaacgaagaaatggttccggtggcaaaaactcgtgctttgtatgcacccgacacccgatttcgaaatgtgtgacgtgcgataacgaaattgcgagaaaccaccccaaacatgagttttggacctaaagtagtggattgggcatgttcgttgtgaaaaacgaagaaatggttccggtggcaaaaactcgtgctttgtatgcactccacacccgttttcggaatgggtgacgtgcgacaacgaaattgcgcgaaaccaccccaaacatgagttttggacctaaagtagtggattgggcatgttcgttgcgaaaaacgaagaaatggttcctgtggcaaaaactcgtgctttgtatgcaccccgacacccgttttcggaatgggtgacgtgcgacaacgaaattgcgcgaaaccacccgaaacatgagttttggacctaaagtagtggagtgggcatgttcgttgcgaaaaacgaagaaatggttccggtggcaaaaagtcgtgctttgtatgcacccgacacccgttttcggaatgggtgacgtgcggcaacgaaattgcaggaaaccaccccaaacatgagttttggacctaaagtagtggattgggcatgttcgttgcgaaaaacgaagaaatggttccggtggcaaaaactcgtgctttgtatgcacccgacacccgatttcgaaatgtgtgacgtgcgataacgaaattgcgagaaaccaccccaaacatgagttttggacctaaagtagtggattgggcatgttcgttgtgaaaaacgaagaaatggtttcggtggcaaaaactcgtgctttgtatgcactccacacccgttttctgaatgggtgacgtgcgacaacgaaattgcgcgaaaccaccccaaacatgagttttggacctaaagtagtggattgggcatgttcgttgcgaaaaacgaagaaatggttcctgtggcaaaaactcgtgctttgtatgcaccccgacagccgttttcggaatggttgacgtgcgacaacgaaattgcgcgaaaccaccccaaacatgagttttggacctaaaatagtggattgggcatgttcgttgcgaaaaacgaagaaacggttccggtggcaaaaactcatgctttgtatgcaccccgacaccggttttcggaatgggtgacgtgcgacaacgaaattgcgcgaaaccaccccaaacatgagttttggacctaaagtagtggattgggcatgttcgttgcgaaaaacgaagaaatggttccggtggcaaaaactcgtgctttgtatgcaccccgacaccagttttcggaatgggtgacgtgcggcaacgaaattgcgcaaaaccacctcaaacatgagttttggacctaaagtagtggattgggcatattcgttgcgaaaaacgaagaaacggttccggtggcaaaaactcgtgctttgtatgcacccgacacccgttttcggaatgggtgacgtgcgacaacgaaattgcgcgaaaccaccccaaacgtgagttttggacctaaagtagtggattgggcatgttcgttgccaaaaacgaagaaatggttcctgtggcaaaaactcgtgctttgtatgcaccccgacaaccgttttcagaatgggtgacgtgcggcaacgaaattgcgcaaaaccacctcaaacatgagttttgggcctaaagtagtggagtgggcatgttcgttgcgaaaaacgaagaaatggttccggtgacaaaaactcgtgctttgtatgcaccctgacaaccgtttttagaatgggtgacgtgcggcaacgaaattgcgcgaaaccaccccaaacatgagttttggacctaaagtagtggattgggcatgttcgttgcgaaaaacgaagaaatggttccggtggcaaaaactcgtgctttgtatgcacccgacacccgttttcggaatgggtgacgtgcggcaacgaaattgcgcaaaaccaccccaaacatgagttttgtacctaaagtagtggattgggcatgttcgttgcgaaaaacgaagaaatggttccggtggcaaaaactcgtgcttttatgcacccgacacccattttcggaatgggtgacgtgcgacaacgaaattgcgagaaaccccccccaaatatgagttttggacctaaagtagtggatttgggcatgttcgttgcgaaaaacgaagaaatggttcatgtggcaaaaactcgtgctttgtatgcaccccgacacccgttttcgaaatgggtgacgtgcgacaacgaaattgcgagaacccccctcaaacatgagttttggccctaaagtagtggattgggcattttcgttgcgaaaaaacgaagaaaaggtttcggtggcaaaaactcgtgcctttgtatgcaccctgacacccgttctcagaatggttgacgtgcggcaatgaacttgcgcgaacccaccccacacatgtgtttgagacctaaggtagtggatgggcccttttcgttgcgaaaaagaagaaatggttccggtggcaaaaactcgtgctttgtaagtccccgacacccgttttcggaatgggtgacgtgcgacaacgaaattgcgcgaaaccaccccaaacatgagttttggacctaaagtagtggcttgggcatgttcgttgtgaaaaacgaagaagtggttcctgtggcaaaaactcgtgctttgtatgcaccccgacacccgttttcggaatgggtgacgtgcgacaacgaaattgtgcgaaaccaccccaaacatgagttttggacctaaagtagtggattgggcatattcgttgcgaaaaacgaagaaatgattccggtggcaaaaactcgtgctttgtatgcacccgacacccgttttcggaatgggtgacgtgcgacaacgaaattgcgcgaaaccaccccaaacatgagttttggacctaaagtagtggattgggcatgttcgttgcgaaaaacgaagaaatggttccggtggcaaaaactcgtgctttgtatgcaccccgacaaacgtattcagaatgggtgacatgcggcaacgaaattgcgcgaaaccaccccaaacatgagttttggacctaaagtagtggattgggcatgttcgttgcgaaaaacgaaaaaaatggttccggtggcaaaaactcgtgtttgtatgcacacgacacccgttttcggaatgggtgacgtgcgacaacgaaattgtgtgaaaccaccccaaacatgagttttggacctaaagtagtggattgggcatgttcgttgcgaaaaacaaagaaaatggttccgctggcaaaaactcgtgctttgtatgcaccccgacacccgttttcggaatgggtgacgtgcaacaacgaaattgtgcgaaacaaccccaaacatgagttttgaacctaaagtagtggattgggcatgttcgttgcgaaaaacggagaaatggttccggtggcaaaaactcgtgctttgtatgcacccgacacccgttttcggaatgggtgacgtgcgacaacgaaattgcgcgaaaccaccccaaacatgagttttggacctaaagtagtggattgggcatgttcgttacgaaaaacgaagaaatggttccggtggcaaaaactcgtgccttgtatgcaccctgtctcttatacacatctcaaccatcatcgatgaattttctcgggtgttctcgcatattggctcgaattcgagatcgaattcgcccttagggtttagggtttagggtttagggtttagggtttagggtttagggtttagggtttagggtttagggtttagggtttagggtttagggtttagggtttagggtttagggtttagggtttagggtttagggtttagggtttagggtt

SEQ ID NO: 804 - DNA, 6377 bp, Zea mays
  source: /note="Zea mays BAC clone full insert sequence contig bacm.pk119.a23.fis41"
ctaccttggcttgatcaacctcaattccctgtggagtcacaacataaccaaaaaacgaaactcgatcggtgcaaaatgtgcacttctcaaggttaccaaataaccgtgcatctcgtaaagcattaaaaacagcacgcatgtgatcaacatgttcatccatagatttgccgtagatcaatatgtcatcaaagtatactaccacaaattttccaatgaaggcacgcaaaacctcgttcattaatctcatgaaagtgctaggtgcattagttaacccaaaaggcatgactaaccactcatacaatccgaacttagttttgaaagcagttttccattcatctcccaatttcatacgaatctggtggtacccactacgcaaatcaactttagaaaagacaatggcaccactcaattcatcaagcatatcatctaaacgtggaatagggtgtcgataacgtatcgtgatattattaatagccctacaatcaacacacatacgccatgttccatcttttttaggcactaaaataaccggaacagcacacggactaagagactcacgcacgtaacctttgtcgagtagttcttgcacttgtcgctgaatttcttttgtttcctctggatttgtcctatatggcgcacgattcggcaaagatgcaccaggaataagatcaatttggtgctcaatccctcgtataggtggcagcccctctggtatctcacttggaaatacatcagaatactcctgcaaaatgttagtaataacaggaggcaaagaatgctgcatatcttgaattgaaatcaaagcatccttgcataccaaggcgtaggcaacagtagtggaagcaaataattcattaacatcagtttttgttgcaagcaagcaatgtcctttcaattttatcccatctttgttattaccaacaactttaatattcttgttgttctcagttttagctttggtagctttagcaacatcatcacgcacaatagcctcaggggacatgggaagcaaaataattttcttatcatggtgtatgagagaatattgatttgatctaccatgatgcatacaatctgaatcaaattgccatggtctacctagcagaatattacaagcatccataggcacaacatcacagtcaacaacatcacgatatgaaccaatagcaaaattaattcgtaccagcttggttaccttgaccttaccactattgttgagccattgaatgtgatatggatgcgggtgcggtttggtcgtaagtgcaagcttctccaccatgtcgctgctagccaagttgttgcagctacctccatcaatgatcaaacgacatgaacgctccttaatgacacactttgtttgaaacaacgtatgtcgctgattctgctctgccttctccatttgtgcactaagcacacgctgtacaatgaggctctcataatgctctgcatcatctgcaccaatctgttcttcgggtggttccttagtgcctgcatcatcagccgcaagcaaagcaagtgtagcttcatccaaatcactagcaaaggaatacccaccatcgtcttttaccaccaaaacacgctgattaggacaatcacgttgcacgtgtccatagcccttgcatcgataacatagaacatctcttgttctacccgtggaggctactgaagaggcactacctgctggtttctgggcagatttggttgttgagtttgtggaagatgcacgtggtttgtcaccggaggaaggcgggggtgctggtcgacttggcgagggagttggtgctggtgtacgaccggtcatggacgtagtcgtgcgctgttgccatggtgtagattttcctgcataaacattagaccttgcactagcacgtcgtccctgcacttccctttcatctttgcaagcaagatgaaacaatcgggttacattagcataatctttataagcaaggatgtcctgaatttccctatttaacctgcccaaaaatctagccatagcagattcctcaccctcctctatgttacaacgcagcatacccatttgtaattcctgataatattcttctacacttttagtaccctgtctcaattcttgcaacttgtttaacatatcacgtgcataataagaaggaacaaatctagcccgcatgacacgtttcaacgcatcccaagtttgtggcatgttattaggattcttcttaccatgttctatccaccaaacagaagcaaattcagtaaactcactagtagcagctctaacccgcgcattctcaggaaattcatggcatgcaaacttttgatcaaccgcaatctcccaagtaatgtaagcatcagggtcatatttaccatcaaaaggaggtattttaaatttaaccttactaaaagcatcatcattaccatgtacctcacgtcggcgaaaaccacccatacctctacggttagtacgtagtcgccgacgattatgtgcttcttggtcatcttgttcagtatcagcaacatagtcatcccagttaccttcggcgccctcatcacgcccaccattggttagcatgcatctcatcaaatcgcctcaagagtgcgacaaggctcttgtcaatatgagcaactgtcatttccacatttgcaagtttggtgtttgtgtcgatctgtgtggcctccaattgccccatcttttcattcgtcacctgcatgtcattatcaagaccttccgtgtgcgttttcaccagccttacaaagtgttgtatgatacccttggtgcgaggagagtgtggcatattacgagaagcatcatcaacctccaatcctgccatggttagacgaacagaggcaacaagaaaaaaaatgtgaaggaataaaaactctacaactattaggatgtagctactgcaaggcgctcactctcaacctgccacacaagctcttaccaattcttaccttgcacaacacgaggggtcagcaaccaacaagtctgcaaccgtggaataagtgtatcggtgccgcagcaacacgacctgtcaaactgtagtcgaaatatgtagagttgtaggtgggctgaagcaaggaatacactagtaccacgttagttacaaaagcaagctgaataatcgttcaacggtggtactgtgctggtcctaggctaaaccatgctagagacgtgagcctaggcacaaaggtagtcactgaaaaagaacaactagcacagcacaaagagaaacaacagatttagagattcagcccccttcttcttcttttcctttttttttcttttctattctttcttttcttcttcttctgtttttttttgcagggacctaaacccttttttcactatgacaacccaaacaataaagatattgctaacagcccctttaaatcagatttaacaaatcttgttaatatagaaagtccagaaatctctacgatgattgcggagcgctcagaatgaattttgagacaaggtcagatccgttggaaagaagataagataagctttccagattgtatttaaacttccaaatcggacatgagatgtatccgtggtggcaaaaacgaaccagagatgtttatggtgatggtggatctcgcggtgaccaaaacgtggtagaactcaaaactctaaaggaataaactaagaccagcaactcgacacaaccgatgcaaccaaaaactcaacaagccctaactaagtagtactagtaaatgctcaatggtttataggattgcggtaaaactaatctactattttttggctttttctggactataggagataagaaaacagcgaagaaaagtaaatctctcaccgataaaccttgctctgattaccagctgatgtgcacccgttaggtgattgcccgatctttcgatgagagggtgtggaataactcgattgggggaggagacgacgttcacggcccgactacagccttccaaagacgctgcgccttagcaaccgatacaccacctcctatggctgtcacgatcttgtggagcgtgacaccctagccactagggcactcgtcctgcaagcaatcgaagaactagcaagaacaagtagaacaagtactgaattaccagatctaaatgtaggtttaaaaatcaaactccaatatggtggggttccgaagacaagaagacgggcggctgaactagcacgcgcgcttgcaagcaagtagcgagagctaaacttgatctaaacaaaacccgctgttcttggtggcggctagggggtttataaacatgggaggacgaccacaagggtattggggtcgtgctgcaaccctaggatgcatccctaatggacctaacttgatacacgacccattgggccaaaatagggtgacgcagcaccatgggcagaaaaggcaggaaatgtctcgataagaaaacaatgattacggcggcctcagaacagatatgactataattccggatccataggaaagtagacttgataagctttccatgttgtgcttgaacattccaatccgagcccgcatctgaccgtggtgaccgtcacaagttggtgttcttctgcagtccgaatccagcatgttcaaatccttttccctttcggtcttctccctgattcctaagcaaaacaagagtgcacgggtctccatggtctaaatatgatggacatgaactcaagagtgtaatcacctgatggttgagttgacgagcacgagcgcgagtaatgggaccagaaattggtacttgtattggtatagatgcatcagtagtgttgatgtcttcatcacactattttaggtccaaaactcatgtttggggtggtttcgcgcaatttcgttgtcgcacgtcacccattccgaaaacgggtatggggtgcatacaaagcacgagtttttgccaccggaaccatttcttcgtttttcgcaacgaacatgcccaatccactactttaggtccaaaactcatgtttggggtggtttctcgcaatttcgttatcgcacgtcacacatttcgaaaacgggtgtcgggtgcatacaaagcacgagtttttgccaccggaaccatttgttcgtttttcgcaacgaacaggcccaatccactactttaggtccaaaactcatgtttggggtggtttcgcgcaatttcgttgccgcacgtcacccattccgaaaacgggtgtcgggtgcatacaaagcacgagtttttgccaccggaaccatttcttcgtttttcgcaacgaacatgcccaatccactactttaggtacaaaactcatgtttggggtggttttgcgcaatttcgttgccgcacgtcacccattctgaaaacggttgtcggggtgcaataaaagcacgagtttttgccaccggaaccatttcttcgtttttcgcaacgaacatgcccaatccactactttaggtccaaaactcatgtttggggtggtttcgcacattttctttgtcgcacgtcacccattccgaaaacgggtgtcggggtgcatacaaagcatgagtttttgccaccggaaccgtttcttcgtttttcgcaacgaatatgcccaatccactattttaggtccaaaactcatgtttggggtggtttcgcgcaatttcgttgtcgcacgtcacccaatccgaaaacgggtgtcggggggcatacaaagcacgagtttttgccacaggaaccatttcttcgtttttcgcaacgaacatgccaaatccactactttaggtccaaaactcatgtttggggtggtttcgcgcaatttcgttgtcgcacgtcacccattccgaaaacgggtgtggggtgcatacaaagcacgagtttttgccaccggaaccatttcttcgtttttcgcaacgaacatgcccaaatccactactttaggtccaaaactcatgtttggggggggtatcgcgcaatttcgttatcgcacgtcacacatttcgaaaacgggtgtcgggtgcatacaaagcacgagtttttgccaccggaaccatttcttcgtttttcgcaacgaacatgcgcaatccactactttaggtccaaaactcatgtttggggtggtttcgcgcaatttcgttgccgcacgccacccattctaaaaacggttgtcagggtgcatacaaagcacgagtttttgccaccggaaccatttcttcgtttttcgcaacgaatatgcccactccactactttaggtccaaaactcatgtttgaggtggttttgcgcaatttcgttgccgcacgtcacccattctgaaaacggttgtcggggtgcatacaaagcacgagtttttgccactgggaccatttctacgtttttggcaacgaacatgccaactttaggtccaaaactcatgtttggggtggttttgcgcaatttcgttgtcgcacgtcacccttattg

SEQ ID NO: 805 - DNA, 5487 bp, Zea mays
  source: /note="Zea mays BAC clone full insert sequence contig bacm.pk119.a23.fis42"
cagaataggtgacgtgcgacaacgaaattgcgcgacaccacctcaaacatgagatttggacttaaagtgggcatgtacgttgcgaaaaacgaagcaatggttccggtggcaaaaactcgtgctttgtatgcaccccgacacccgtcttcggaatgggtgacgtgcgacaaggatattgcgcgaaaccaccccacacatgagttttgtagctaaagtagtgcactacttgggcatgtttgttgcgaaaaaacgaagaaatggttccggtggcaaaaactcgtgctttgtatgcacccgacacccgttttcggaatgggtgacgtgcgacaacgaaattgcgagaaaccaccccaaacatgagttttggacctaaagtagtggattgggcatgttcgttgcgaaaaacgaagaaatggttccggtggcaaaaactcgtgctttgtatgcagcccgacacctgttttcgaaatgggtgacgtgcaacaacaaaattgcgagaaaccaccccaaacatgagttttggacctaaagtagtggattgggcatgttcgttgcgaaaaacgaagaaatggttccggtggcaaaaactcgtgcttttatgcacccgacacccgttttcggaatgggtgacgtgcggcaacgaaattgcgcgaaacgaccccaaacatgagttttgtacctaaagtagtggattgggcatgttcgttgcgaaaaacgaagaaatggttccggtggcaaaaactcgtgctttgtatgcagcccgacacctgttttcgaaatgggtgacgtgcagcaacgaaattgcgagacaccaccccaaacatgagttttggacctaaagtagtggattgggcatgttcgttgagaaaaaagaagaaatggttccggtgacaaaaactcgtgcttttatgcacccgacacccgttttcggaatgggtgacgtgcggcaacgaaattgcgcgaaaccaccccaaacatgagttttgtacctaaagtagtggattgggcatgttcgttgcgaaaaaagaagaaatggttccggtggcaaaaactcgtgctttgtactgataaccgttttcagaatgggtgacgcgcggcaacgaaattgcgcgaaaccacccaaaacatgagttttggacctaaagtagtggattgggcatgttcgttgcgaaaaacgaagaaatggttccggtggcaaaaactcgtgctttgtatgcacccggcacccgttttcggaatgggtgacgtgcgacaacgaaattgcgcgaaaccaccccaaacatgagttttgtacctaaagtagtggattgggcatgttcgttgcgaaaaacgaagaaatggttccggtggcgaaaactcgtgcttttatgcaccccgatacccgttttcagaataggtgacgtgcgacaacgaaattgcgcgaaaccacctcaaacatgagatttggacctaaagtgggcatgtacgttgcgaaaaacgaagaaatggttccggtggcaaaaactcgtgctttgtatgcaccccgacacccgttttcggaatgggtgacgtgcgacaacgaaattgcgcgaaaccaccccaaacatgagttttggagctaaagtagtgcactacttgggcatgtttgttgcgaaaaaacgaagaaatggttccggtggcaaaaactcgtgctttgtatgcacccgacacccgttttcggaatgggtgacgtgcgacaacgaaattgcgagaaaccaccccaaacatgagttttggacctaaagtagtggattgggcatgttcgttgcgaaaaacgaagaaatggttccggtggcaaaaactcgtgctttgtatgcaccccgacacctgttttcgaaaggggtgacgtgcaacaacaaaattgcgagaaaccaccccaaacatgagttttggacctaaagtagtggattgggcatgttcgttgcgaaaaacgaagaaatggttccggtggcaaaaactcgtgcttttatgcaccccgatacccgttttcagaatgggtgacgtgcgacaacgaaattgcgagaaaccacctcaaacatgagttttggacctaaagcagtggattgggcatgttcgttgcgaaaaacgaagaaatggtttcgctggcaaaaactcgtgctttgtatgcaccccgacactgtggcagaaccacccgaattattccagcttaagtgcctcagtcatgcctcaggggccgtaacacacttaaatcggaataacccgtcagttcttcagatctagtctgatagagccacttaactaggatcaaattccacaatctcactcgaaggtgagtcacagaagaaatacaataaaacaggaaaccacaaattaagtactgagttattacataaatcggagtttttgcgtagcaaataaagttcacaaaataaagtgcagcggataatcgatgtcgttggtaatgaggaaatggacaaggcctagcccactattcctcatgctcctctccagtcggagcaacatcccactcgaccgtccaaccaggtggcagggtggtaggccaactcacaccatcaaccatatcctgaatggtacctgcaaaaatggtgccacaagcaaggctgagtatactaatactcagctagacttaaccggtgtgaggagtctactcctctacctctagactatgcagctgtttggctgaggggtttggtttgccaaaagcactagttgtttctaaaatcaatttttagcttttcaaattctaccatcattaacttagctagatttgcttcttttaagcagacatggtgatgaagctgaggtgcccgatctttcggcgagtagagataattccgatttgtcggaagatgacccttgcgatccgactacgacgagcaagcccgaggcgccaatgcaatcgctgaaccaactccctgtggttaccgaccttgctgatgcgagatcggcctgatcacgaagatcgtttcctgtgcgcaatcgaagaacgaacaagaacaagatgcgagcaatctaatctattactcgagggtggagttctgaatacacgaagacagcgcagatttgcgcgtgttcgagagtagctaaggctaacgtaaaacaaaactcgagaataaaggaggcgcagctcctggataaatagagggggcgcagcccctagggcggccaaccctaggtcgtccactatgggccgcagttgggctggtcgtctattcttctaggccctcattcttcagtagcatgacgaagttaagatctctggcacgggcccgagtgattggccgtcgtgaatttgggcaagatcgctgtgaaggatttgttcacctgaccaagctttgtcttttgtgtatggacgtcgcgcggttttaggctagggacagggagttgtagcgtcaccaaggtgctagtgtcagaatgcctggtcccgaggtcaagctgcgccaaaaccatgccaaatgaatttggtttgagttcaaacttttccaggatgtgttcaagggaatttggcacgactttgatatttggatctcctggctttgagtttcaaaaagcagagaacgcagatgatctttgggaagaggtctgaaattcagaaattcagaaatctgaatttctctaagggttcatagatcaagggctgatttggggatttatttgagttattttggctaagctttctcaacctttcttgttgctcgataaatatactttaacttatataattggctcaaatcaacattttaaacttttcattccctttctcttattttcttgaattttgctcatggggctcacttagggtttttaattagggctgcacattcttaccttttcaaggactcaattgttttgatcatgacacttttaagtatatacttggtgacttctttattacttaagttattttgatgctcatgcttactttggttctcataaaataatggttctaggtttggcattttgagagaaaccctaggtgacactggggtgtcacagccttcccccttaaaggaatctcgtcccgagattcgggccagagtcctcctagggtgaagcgaagggtgagacttatacgaaatgggtgattgttgttattattagggtaaaattgctcttcgaatgtcattctctttgaaacatcagaaggaagtccttttaagttttacttcatagtttcttcattctgaattaagatcatatttttggaaattagattcgaagggcgggaggaggggttgggggtgattacgtaccagcttccttaggtaggcaatcggggaagttggatcttaagaattcctcggtttcccaagtagcttcctcctctgagtgattactccactggaccttgtacatcttgatcgatttagcccgagttgatctttctttgcaatccagaatcttggaggggtactcttggtacgatagatctggctctatctccaattctggttctgctatgatctcggtcggcaatcgaacacacttcttcagctgagatacatggaatacactgtgaatggcagacatctttgaaggtaacttcagcttgtatgccacgggtccacatgcttctatgatctcataaggtccaatgtaacgaggggctagcttgcctttgatcccaaacctctgcactcccttggtgggtgataccttgaggtatacaaaacttcccacctcgaactggagaggttttcttcttttatcatgatagctcttctgcctggcctgagcagcttctagattcttcctgattagcttgaccttcctttcagcttcagtcactaaatcaggtccaaaaacttctctttcaccaggttgagaccaattgagtggtgtcctacacctttttccatagagagcttcaaaaggtgccatctttaggctggattgataactattgttataagcaaactctgccaaggagaggtgcttatcccagttcttgccacaatcgatcgcacaagctctcagcatatccttcaggatttggtttaccctttccgtctgaccatcagtctgtgggtggtaagctgaactcctgattagcttggttcccaaagactcttgcaattgttcccaaaatctggcaacaaattgggctcctcggtcagaaacaatggtccgaggtaatccgtgcaaacacacgatccggtcaatatacaattctgcatatttctgagccttatcagtggtgtgcacaggaagaaaatgtgccactttcgtcaatcggtccacaataacccaaatcgaatcatgatgacgagaggtgttgggcagacccacaatgaaatccatgatgatgtcatcccacttccacgaaggtacggacagtggttgcaaagctccagctgacttcaagtggcttgcctttatcctctgacaggtgtcacactttgatacatactgagctatctccctcttcattctggtccaccagtacaaaggcttcagatcatggtacatcttggtgcttcccgggtg

SEQ ID NO: 806 - DNA, 11393 bp, Zea mays
  source: /note="Zea mays BAC clone full insert sequence contig bacm.pk119.a23.fis43"
acttacaaaaaacatggtttttttgtcttaaaaaaagggggctgggttttttttttggggagaaaaaggaaaaaaagatttcgtggggagaaaaaccccccgccttgttgtgtcccccccccccccttttttgggagggggggtgttggggggcccacgacgttgggaggcccccccccaaaaaaaaaattttggccccataagtcggggaatggcccttttttcgttgaaaaaaaaaaaaaaaaaatgcttccggcggcaaaacctcctgcttttttgggcccccccccccccgttttttggatggggtggcgggccaccaaaaaaaaagaaagaaccccccccaaacaaaatttttatttctaaagtaggggattgggcttttttgttgcgaaaaacgaaaaaatggttccgggggcaaaaactcgttctttgtatgcaccccgacacctgttttcagaatgggtgacgtgcgacaacgaaattgcgcgacccccccccaaacatgagttttggacctaaagtagtggattgggcatgttcgttgtgaaaaacgaaaaaatggttccggtggtaaaaactcgtgttttgtatgcccccgacacccgttttcggaatgggtgacgtgcgacaacgaaattatgtgaaacccccccaaacatgagttttggacctaaagtagtggattgggcatgttcgttgcgaaaaacgaagaaatggttccggtggcaaaaactcgtgcttttataaatacccgttttcagaatgggtgacgtgcgacaacgaaattgcgcgaaaccacctcaaacatgagttttggacctaaagtagtggattgggcatgttcgttgcgaaaaacgaagaaatggttccggtggcaaaaactcgtgctttgtatgcacccccacacccgttttcagaatgggtgacgtgcggcaacgaaattgtgcgaaaccacccaaacatgagttttgaccctaaagtagtgaattgggcatgttcgttgtgaaaaacaaagaaatggttccggtggcaaaaactcgtgctttgtatgcacccgacacccgttttcggaatgggtgacgtgcgacaactgatgtagctgaggtgcccgatctttcggcgagtagagataattccgatttggcggaagatgacccttgcgatccgactacgacgagcaagcccgaggcgccaatgcaatcgctgaaccaactccctgtggttaccgaccttgctgatgcgagatcggcctgatcacgaagatcgtttcctgtgcgcaatcgaagaacgaacaagaaaaagaggcgagcaatctaatctattactcgagggtggagttctaaatacacgaagacagcgcagatttgcgcgtgttcgagagtagctaaggctaacgtaaaacaaaactcggaaaataaaggaggcgcagctcctgaataaatagagagggggcgcagcccctaggggcggccaaccctaggtcgtccattatgggccacaattgggctggtcgtctattcttccgggccttcgttctttaacaacatgatgtagttcaattctcttgcacgggcccgagtcactggcccaagtggaaggggtggcgcctgggctagagaaggtgctgctggtgtagatgtgctcgtgttggtgttgatgtccgcatcatcctccccttcttgaactgaagtcgtcctcaacggcaactcctcatgttctcccgcatacggtttcaaatctgcaacattaaaactagtggaaacaccaaactccgcaggcaggtcaaggatataagcattatcattaatcttggttggtaccttaaaaggaccagcagcacgaggcatcaatttagaacggcgcaaagtaggaaaacgatcctttctcaaatgcaaccaaaccatatcaccaggttcaaaagtaacatgttttcttcctttactaccagcaacctgattttttgcattagtagcagcaatgttctgtttcgtttgttcatgtatggtaatcatttgttcaacatgtgcagaagcatctacatgtggggcgttcgcagcattaagtgaaatcaaatcaataggtgccctaggaatgtaaccataaacaatctggaaagggcacatctttgtagaagaatgtgtggcatgattgtaaacaaattcaacatgaggcaagcaatcctcccaacgtctcaaattcttgtttaaaacagccctaagcatggtagataaagttctatttactacctcagtttgtccatcagtctgagggtgacaagtagtgctaaacaacaatttagttcccaatttattccaaagagatctccaaaaatggcttagaaacttagcatcgcgatcagagactattgtttttggaataccatgtaaacgaataatttctctaaagaacaattcagcaacaatgctagcatcatcagttttatgacaaggtataaagtgagccattttagagaatctatcaacaaccacaaaaatactatccctccccttcttagttctaggcaagcccaaaacaaagtccatagagatatcaaggcaaggagaagaagggacaggcaaaggcatatacaaaccatggttgttcaaccgtgacttagctttctgacatgtagtgcagcgtgcaacaaggcgctccacatcagcgcgcatccgaggccaaaagaaatgggcagccaacacctcatgcgttttgtagacgccaaaatgccccatgagaccgcctccatgcgcttcatgtaacaacaaaagacgaaccgagctagctggaacacacagcttgttagcgcgaaacaggaacccatcctgtatgtgaaatttaccccatggtatcccattaatacaatggccgaaagcatctttaaaatcagcatcgtcaacatattgatccttcagagtgtccaaaccaaagattttaaaatctaattgtgacagcatggtatagcgacgagacaaagcatcagcaataacattgtccttcccgttcttgtgtttaataatgtaaggaaaggactcaatgaattcgacccatttagcatgacgacggttcagatttgtttgggtacgaatatgttttaaagcctcatgatcagaatgaattatgaactcacgatgccaaagatagtgctgccatgtatgcaaagtgcgcactaaagcgtaaagctccttatcataagtagaatatttcagactagcaccgcttaatttttcactaaaataagcaactggttttccttcttgtaacaaaacagcacctagcccaataccgctagcatcgcattcatgctcaaaaactttattaaaatcaggcaattgcaagaggggagcttgggttaacttatctttcaaagtgctgaacgctacctcctgcgaatcactccaagcaaacgacacatctttctttgtaagctcatgtagaggcgctgcaatggagctaaaatcacgaacaaatctgcggtagaaaccggcaagtccaagaaagctccgaatttgtgtgaccgtcgtcggtgtaggccactcccgaatggcagcaatcttgctgctatccacctcaatgccctgcggagtaaccacataaccaagaaacgagacacgttgcgtgcaaaatgtgcacttttccatgttaccaaacaagcgagcagcacacaaagcataaaaaacagcatgcaaatgttctaaatgctcctctatagacttgctgtaaataaggatatcatcgaaataaacaacaacaaacaaacctatgaaggcccgtagaacttcgttcattaaacgtataaaggtgctgggagcattagtcaatccaaatggcataaccaaccattcatataaaccaaatttcgttttaaaagccgttttccattcatcaccgagtttcattctaatctgatggtaaccgctacgcaaatcaaccttagagaaaataatggcaccactaagctcatctaacatatcatcaaggcgtggaataggatatcgataacgaactgtgatgttattaatagcacgacaatctacgcacatacgccatgacccatctttctttggaacgagtaaaacaggaaccgagcaagggctaagagactcgcgaatgtaacccttatcaagcagcgtctgcacctggcgttggatctccttcgtctcctctggatttgtacggtacggggcgcggttcggaagagaagcgccggggatgagatcgatctgatgctcaatgccacggaggggaggaagacccggtggtaagtccgtaggataaacatcagcatactcctgcaaaaggttaacaacagcagggggtatatccaaagacggtgcatcatcaagcggaacaagcatgcgcgagcatacaagtgcataacagggcatatgagcttcatggagatcatcaaaatcagcacgtgtagcaagtaaaacaggagagtgcaacttgatttcagatttaataggtgcggctgatgtcgaattgacttgttgtgcagttttagcagccctagtaagatcatctttcaaaatttggtcaggggtcattggatgtataattattttctggcctttaaacatgaaagaataatgatttgaacgaccatgatgtaaactatcagtatcatattgccaaggtcgacccaataacaaagagcatgcttccataggaataacatcgcaatcagcataatcagaataagaacccagcgaaaaggggacacgtaccgaacgtgttacctttattttaccaccatcattaagccattgaatgtgatacggatgtggatgtgtgcgagtgggcaaggataatttctctaccaacgctgtacttgccaaattgttgcagctgccactatcgatgatgatgcgaatcgaccgttcgtgcacgacgcccttggtatggaatagagtgtgtcgctgatttttttcggcctgcacaacaagactctcatacctatcggcgtcgatgggatcaacgtggacttcctcattttctgcatggttagtggcaatcatagtatgactagtttcctcagaatcactggctgaagagtactcaccattgtcacgtataagcaaggtacgcttgtttgggcagtcccgaatcatatgtccaaaccctctgcaacgatggcactgaatatcccgtgtacgtcctgtggaagaagcggcgcctttggcagggggcgccactggcttggtcgtccctgtgcgcgatgtagtgctaggcgtaggaggtgcagggctggaaggagttgagctgtgtgttggaccccggcctgcaagagagttagtatatgtctttgatcgtcgtccctgcacttcacgttcagctttgcaagcatattcaaacaatgtggttatatcaaaataatccttataatcaagtatatcctgaatttccctgtttaaaccaccacgaaaacgcgccatagcagcgtcatccgactcaaccaaaccacaacgaagcatacccttttgtaactcctggtaatattcctcaacagactgtgaaccttgttgaaaacgctgcattttgttaagcaaatcacaagcataataggaaggaacaaatctgtggcgcatggcagtttttaattgggtccaagtaatgacactgttaatgggaagtttttgtttatactcacgccaccaaattaaagcaaaatcagtaaattcactaatggcagccttcacttggctattagcaggaatatcatggcatgaaaatttctgttctacctctaattcccaatcaagatatgcagcaggatcatatttaccattaaaagatggaattttaaatttaatcttagaaaataagtcattagcgggatgacgaaccacacgacgtgcacgaccacggcgatctccatcgtcctgctcagtgtcaccgccgtattcctgctccatctttgtggtcaaggcatcaaggcgtgccaggatggtgtcgagtgtggtgcgagtcgccgtttgagcaaggtcaagttggttgaaacgctcggtcgtcgaagtgatcgttgaatcaagccgttcatgcatcgtcctaatgtcagcagcaagtccatcaacttgtccccttacttcctgcaactgggcatccaccatgttgggtgctcctgccatagttagtgcaaacaccaaaacaccaaaaggagaaaaaaccaacgacaaaaacaggggtgtactgctcacaaggcgctcacactagtgctgttatcaagttcttatccgttcttaccaagccacagtggtgaactgcaatcaacaggtggaaccggtgaaagattggatgagcgattgcgtggagaaacagaaacctgctcgtcgtagaaatatgtggagttgtgggtaggctgcactcaagtcaaggattagcacgatcaaacaataatgcaaagttgaattatagtgcaaaacacgaaactatattgctggccacaggtgcaaaggatggatggaactagcagaatggcagtaacgtaaatattgtactagtgatgccaaaaaggcactagtagaaatcacaggtgattttgtttttctttgttgtatgatttttttgatatttttcttagcacaagaagcaacaagataggagctacacgaagtttcacctaaaacagatatcagatgtggtatacagaaaatcaggaagttctctgaaaagcgtgcgagaactttgacgaatttttttctttattttcctgaatttttttgacaattttgtcgaaaccaaacagaccgaaggtgagtttggccggcctccgaatggtgtcaacaagctcctgcaaaaatttcagattttttggacacccgagcgaaaagttatgcccggtttacggaaggtacctcaagttatgttttaaaaacgaccgggatgaaacaaccgtatcctttctccttcgttttctttttttttgtttctgtttttttttttgatgtaaccgaaggagaaaaacaaggaagcggtcgttgactcgatttgttttttttctgttttttttcgtaaccgaaggagaaaatcaaggaaacgaccgttgactcggtttgttttttctgttttttttgacgtaaccgaaggagaaaaacaaggaaacaatgttgactcggtttgtggcgtgatcaaacgggagatggtggcggcgctagggtttgaatggtggaagaacacaatgcaaccagcaacaaatgacgcgaaagcacacaaattcaacaatgcagattattgaaagaaagtgcgaggctcaaaagggtgctgggataagatctaacctgaatttttatgtggttttgtggactgtaggaaaaaaaatgctcgataaactcaccgatcaacctggaaatctgataccaattgatgtagctgaggtgcccgatctttcggcgagtagagataattccgatttggcggaagatgacccttgcgatccgactacgacgagcaagcccgaggcgccaatgcaatcgctgaaccaactccctgtggttaccgaccttgctgatgcgagatcggcctgatcacgaagatcgtttcatgtgcgcaatcgaagaacgaacaagaaaaagaggcgagcaatctaatctattactcgagggtggagttctgaatacacgaagacagcgcagatttgcgcgtgttcgagagtagctaaggctaacgtaaaacaaaactcggaaaataaaggaggcgcagctcctgaataaatagagagggggcgcagcccctaggggcggctaaccctaggtcgtccattatgggccgcaattgggctggtcgtctattttttccgggccttcgttctttaacaacatgatgtagttcaattctcttgcacgggcccgagtcactggcccaggtggaaggggtggcgcctgggctagagaaggtgctgctggtgtagatgtgctcgtgttggtgttgatgtccgcatcaacaacgaaattgtgcgaaaccacccccaaacatgagttttggacctaaatagtggattgggcatgttcgttgcgaaaagcgaagaaatggttccgctagcaaaaactcgtgcttttatgcatcccgatacccgttttcagaatgggtgacatgcgataacgaaattgtgcgaaaccacccaaacatgagtattggtcctaaactagtggattgggcatgttcgttgcgaaaaacaaagaaatggttccggtggcaaaaactcgtgctttgtatgcacccgacacccgttttcggaatgggtgacgtgcgacaacgaaattgtgcgaaaccaccccaaacatgagttttggacctaaatagtggatggggcatgttcgttgcgaaaaacgaagaaatgtttcgagtggcaaaaattcgagcttgtatgcaccccgatacccgttttcagaatgggtgacgtgcgacaacgaaattgcgcgaaacccacccaaacatgagttttggacctaaagtagtggattgggcatgttcgttgtgaaaaacgaagaaatggttccggtggcaaaaactcgtgctttgtatgcacccgacacccgttttcggaatgggtgacgtgcgacaacgaaattgcgcgaaaccaccccaaacatgtgttttggacctaaagtagtggattgggcatgttcgttgcgaaaaacgaataaatggttccggtggcaaaaactcgtgctttgtacgcgccccgacacccgttttcggaatgggtgacgtgcgacaacgaaattgcgcgaaaccaccccaaacatgagttttggacctaaagtagtggattgggcatgttcgttgtgaaaatcgaagaaatggttccggtggcaaaaactcgtgctttgtatgcacccgacacccgttttcggaatgggtgacgtgcgacaacgaaattgcgcgaaatcaccccaaacatgagttttggacctagagtagtggattgggcatgttcgttgtgaaaaacgaagaaatggttccggtggcaaaaactcgtcctttgtatgcaccccgacacccgttttcagaatggttgacgtgcgacaacgaaattgcgcgaaaccaccccaaacatgagttttggacctaaagtagtggattgggcatgttcgttgcgaaaaacgaaaaaatggttccggtggcaaaaactcgtgctttgtatgcacccgacaaccgttttcagaatgggtgacgtgcggcaacgaaattgcacgaaaccaccccaaacatgtgttttggacctaaagtagtgcattgggcatgtttgttgtgaaaaacgaagaaatggttccggtggcaaaaactcgtgctttgtatgcaccctgacacccgttttcagaatgggagacgtgcgacatcgaaattgtgtgaaaccacccaaacatgagttttggacctaaagtagtggactgggcatgttcgttgcgaaaaatgaagaaatggttccggtggcaaaaactcgtgctttgtatgcaccccgacacccgttttcagaatgggtgacgcgcggcaacgaaattgcgcgaaaccaccccaaacatgagttttggacctaaagtagtggattaggcatgttcgttgcgaaaaacaaagaaatggttccggtggcaaaaactcgtgctttgtatgcacccgacacccgttttcggaatggctaacgtgcgacaacaaaattgtgcgaaaccaccccaaacatgagttttggacctaaagtagtggattgggcatgttcgttgcgaaaaacgaagaaatggttccagtggcaaaaactcgagcatttatgcaccccaatacccgttttcagaatgggtgacgtgcgacaacgaaattgcgcgaaaccaacccaaacatgagttttggacctaaagtagtggattgggcatgttcgttgcgaaaaatgaagaaatggttccggtggcaaaaactcgtgctttgtatgcaccccgacacccgttttcagaatgggtgacgcgagacaacgaaattgcgcgaaaccaccccaaacatgagttttggacctaaagtagtggattaggcatgttcgttgcgaaaaacaaagaaatggttccggtggcaaaaactcgtgctttgtatgcacccgacacccgttttcggaatggctaacgtgcgacaacgaaattgtgcgaaaccaccccaaacatgagttttggacctaaagtagtggattgggcatgttcgttgcgaaaaacgaagaaatggttccagtggcaaaaactcgagcatttatgcaccccaatacccgttttcagaatgggtgacgtgcgacaacgaaattgcgcgaaaccaacccaaacatgagttttggacctaaagtagtggattgggcatgttcgttgcgaaaaacgaagaaatggttacggtggcaaaaactcgtgctttgtatgcacccgacaccagttttcggaatgggtgacgtgcgacaacgaaattgcgcgaaaccaccccaaacatgtgttttggacctaaagtagtggattgggcatgttcgttgcgaaaaacgaataaatggttccggtggcaaaaactcgtgctttgtacgcgccccgacacccgttttccgaatgggtgacgtgcgacaacgaaattgcgcgaaaccaccccaaacatgagttttggacctaaagtagtggattgggcatgttcgttgtgaaaatcgaagaaatggttccggtggcaaaaactcgtgctttgtatgcacccgacacccgttttcggaatgggtgacgtgcgacaacgaaattgcgcgaaatcaccccaaacatgagttttggacctaaagtagtggattgggcatgttcgttgtgaaaaacgaagaaatggttccggtggcaaaaactcgtcctttgtatgcaccccgacacccgttttcagaaatggttgacgtgcgacaacgaaattgcgcgaaaccaccccaaacatgagttttggacctaagtagtggatggggcatgttcgttgcgaaaaacgaaagaaatggttccggtggcaaaaactcgtgctttgtatgcgccccgacacccgttttcagaatgggtgacgtgcgacaacaaaattgcgcgaaaccaccccaaacatgagttttggacctaaagtagtggattgggcatgttcgttgtgaaaatcgaagaaatggttccggtggcaaaaactcgtgctttgtatgcacccgacacccgttttcggaatgggtgacgtgcgacaacgaaattgcgcgaaatcaccccaaacatgagttttggacctagagtagtggattgggcatgttcgttgtgaaaaacgaagaaatggttacggtggcaaaaactcgtcctttgtatgcaccccgacaaccgttttcagaatggttgacgtgctacaacgaaattgcgcgaaaccacacccaaacatga

SEQ ID NO: 807 - DNA, 9931 bp, Zea mays
  source: /note="Zea mays BAC clone full insert sequence contig bacm.pk119.a23.fis44"
tccactactttaggtccaaaactcatgtttggggtggtttcgcgcaatttcgttgtcgcacgtcactcattccgaaaacaggtgtcgggtgcatacaaagcacgagtttttgccaccggaaccatttctttgtttttcgcaacgaacatgccaatccactactttaggtccaaaactcatgtttggggtggtttcacgcaatttcgttgccgcacgtcacccattccgaaaacgggtgtggggtgcatacaaagcacgggtttttgccaccggaaccatttttcgtttttcacaacgaacatgcccaatccaccactttaggtccaaaactcatgtttggggtggtttcgcgcaatttcgttgtcgcacgtcacccattcggaaaacgggtgtcggggcgcgtacaaagcacgagtttttgccaccggaaccatttattcgtttttcgcaacgaacatgcccaatccactactttaggtccaaaacacatgtttggggtggtttcgcgcaatttcgttgtcgcacgtcacccattccgaaaacgggtgtcgggtgcatacaaagcacgagtttttgccaccggaaccatttcttcgtttttcgcaacgaacatgcccaatccactactttaggtccaaaactcatgtttggggtggtttcgcgcaatttcgttgtcgcacgtcacccattccgaaaacgggtgtcggggtgcatacaaagcacgagtttttgccacaggaaccatttcttcgtttttcgcaacgaacatgcccaatccactactttaggtccaaaactcatgtttggggtggtttcgcgcaatttcgttgtcgcacgtcacccattccgaaaacgggtgtggagtgcatacaaagcacgagtttttgccaccggaaccatttcttcgtttttcacaacgaacatgcccaatccactactttaggtccaaaactcatgtttggggtggtttctcgcaatttcgttatcgcacgtcacccatttcgaaatcgggtgtcgggtgcatacaaagcacgagtttttgccaccggaaccatttcttcgtttttcgcaacgaacatgcccaatccactactttaggtccaaaactcatgtttggggtggtttcctgcaatttcgttgccgcacgtcacccattccgaaaacgggtgtcgggtgcatacaaagcacgagtttttgccaccggaaccatttcttcgtttttcgcaacgaacatgcccactccactactttaggtccaaaactcatgtttggggtggtttcgcgcaatttcgttgtcgcacgtcacccattccgaaaacgggtgtcggggtgcatacaaagcacgagtttttgccaccggaaccatttcttcgtttttcgcaacgaacatgcccaatccactactttaggtccaaaaatcatgtttggggtggtttcccgcaatttttttgccgcacgtcacccattctgaaaacggttgtcgggggtgcatataaagcacgagtttttgccaccggaaccatttcttcgtttttcgcaacgaacatgcccaatccactactttaggtccaaaactcatgtttggggtggtttctcgcaatttcgttgtcgcacgtcacccatttcgaaaacgggtgtcggggtgcatacaaagcacgagtttttgccacatgaaccatttttttgtttttcgcaacgaacatgcccaatccactactttaggtccaaaactcatatttggggtggtttctcgcaatttcgttgccgcacgtcacccattccgaaaacgggtgtcgggtgcatacaaagcacgagtttttgccaccggaaccattttttcgtttttcgcaacgaacatgcccaatccactactttaggtccaaaactcatgtttggggtggcttcgcgcaatttcgttgtcgcacgtcacccattccgaaaacgggtgtcgggtgcatacaaagcacgagtttttgccaccggaaccatttcttcgtttttcgcaacgaacatgcccaatccactactttaggtccaaaactcatgtttggggtggtttcgcacaatttcgttgtcgcaagtcacccattccgaaaacgggtgtcagggtgcatacaaagcacgagtttttgccaccggaaccatttcttcgtttttcgcaacgaacatgcccaatccactactttaggtccaaaacgcatgtttggggtggtttcgcgcaaatttcgttgtcgcacgtcacccattccgaaaacgggtgtcgggtgcatacaaagcacgagtttttgccaccagaaccatttcttcgtttttcgcaacgaacatgcccaatccactactttaggtccaaaactcatgtttggggtggtttctcgcaatttcgttgtagcacgtcacccattccgaaaacgggtatcggggtgcatacaaagcacgagtttttgccaccggaaccatttcttcttttttcacaacgaacatgcccaatccactactttaggtccaaaactcatgtttggggtggtttcgcacatttttgttgccgcacgtcacccattccgaaaacgggtgtcgggtgcatacaaagcacgagtttttgccaccggaaccattttttcgtttttcgcaacgaacatgcccaatccactactttaggtccaaaactcatgtttggggtggtttcgcgcaatttcgttgtagcacgtcaaccattctgaaaacggttgtcggggtgcatacaaaggacgagtttttgccaccgtaaccatttcttcgtttttcacaacgaacatgcccaatccactactctaggtccaaaactcatgtttggggtgatttcgcgcaatttcgttgtcgcacgtcacccattccgaaaacgggtgtcgggtgcatacaaagcacgagtttttgccaccggaaccatttcttcgattttcacaacgaacatgcccaatccactactttaggtccaaaactcatgtttggggtggtttcgcgcaattttgttgtcgcacgtcacccattccgaaaacgggtgtcggggcgcatacaaagcacgagtttttgccaccggaaccatttattcgtttttcgcaacgaacatgcccaatccactactttaggtccaaaacacatgtttggggtggtttcgcgcaatttcgttgtcgcacgtcacccattccgaaaacgggtgtcgggtgcatacaaagcacgagtttttttccaccgtaaccatttcttcgtttttcgcaacgaacatgcccaatccactactttaggtccaaaactcatgtttgggttggtttcgcgcaatttcgttgtcgcacgtcacccattctgaaaacgtgtattggggtgcataaaagcacgagtttttgccaccggaaccatttcttcgtttttcacaacgaacatgcccaatccactaatttaggtccaaaactcatgtttggggtggtttcgcacaatttctttgtcgcacgttagccattccgaaaacgggtgtcgggtgcatacaaagcacgagtttttgccaccggaaccatttctttgtttttcgcaacgaacatgcctaatccactactttaggtccaaaactcatgtttggggtggtttcgcgcaatttcgttgcagcacgtcacccattctgaaaactggtgtcggggtgcatacaaagcacgagtttttgccaccggaaccatttcttcgtttttcgcaacgaacatgaccaatccactactttaggtccaaaactcatgtttggggtcatttcacacaatttggatgtcgcacgtctcccattctggaaacgggtattggggtgcataaaagcacgggtttttgccaccggaaccatttcttcgtttttcgcaacgaacatgcctaatccactactttaggttcaaaactcatgtttggggaggtttcgcacaatttcgttgtcgcacatcacccattccgaaaatgggtgtcgggtgcatacaaagcacgagtttttgccaccagaaccatttcttcgtttttcgcaacgaacatgcctaatccactactttaggtccaaaactcatgtttggggaggtttcgcgcaatttcgttgtagcacgtcacccattccgaaaacgggtgtcggggtgcttacaaagcacgagtttttgccaccggaaccatttcttcgtttttcgcaacgaacatgcccaatccactcctttaggtccaaaactcatgtttggggtggtttcgcacaattttgttgtcgcacgtcacccattccgaaaacgggtgtcgggtgcatacaaagcacgagtttttgccaccagaaccatttttttgtttttctcaacgaacatgcccaatccactactttaggtccaaaactcatgtttggggtggtttcgcgcaatttcgttgtcgcacgtcacccattccgaaaacgggtgtcggggtgcatacaaagcacgagtttttgccagcagaaccatttcttcttttttcgcaacgaacatgcccaatccactactttaggtaactcatgtttgaggtggtttctcgcaatttcgttgtcacacgtcacccattgtgaaaacgggtatcggggcgcataaaagcacgagtttttgccaccggaaccatttcttcgtttttcgcaacgaacatgcccaatccactactttaggtccaaaactcatgtttggggtggtttcacacaattttgttgtcgcacgtcactcattccgaaaacgggtgtcgggtggatacaaaacacgagtttttaccaccggaaccattttttcgtttttcgcaacgaacatgcccaatccactattttaggtccaaaactcatgtttggggtggtttcgcgcaatttcgtttccgcacgtcacccattctgaaaacggttgtcggggtgcatacaaagcacgtgtttttgccaccggaaccatttcttcgtttttcgcaacgaacatgcccaatccactactttaggtctaaaactcatgtttggggtggtttcgcgcaattttgttgtcgcacgtcacccattccgaaaacgggtgtcgggtgcatacaaagcacgagtttttgccaccggaatcatttcttcgtttttcgcaacgaatatgcccaatccactactttaggtccaaaactcatgtttggggtggtttcgcgcaatttcgttgtcgcacgtcacccattccgaaaacgggtgtcggggtgcatacagagcacgaatttttgccaccggaaccatttcttcttttttcgcaacgaacatgcccaatccactactttaggtccaaaactcatgtttgggggtggtttcgcacaatttcgttttcgcacgtcacccattccgaaaactggtgtcgggtgcatacaaagcacgagtttttgccaccagaacaatttctttgtttgtcgcaacgaacatgcccaatccactactctaggtcaaaaactcttgtttggggtggtttcgcgcaatttcgttgtcgcacgtcacccattccgaaaacgggtgtcggggtgcatacaaagcacgagtttttgccaccggaaccatttcttcgattttcgcaacgaacatgcccaatccactactttaggtccaaaactcatgtttggggtggtttcgcgcaatttcgttgtcgcacgtcgcccgttccaaaaacgggtgtcgggtgcatacaaagcacaagtttttgccaccggaaccatttcttcgttttttcgcaacgaacttgcccaatctagtacttttaggtccaaaacacatgtttggggtggtttcgcgcaatttcgttgtcgcacgtcacccattccgaaaacgggtgtcgggtgcatacaaagcacgagtttttgccaccgtaaccatttcttcgtttttcgcaacgaacatgcccaatccactactttaggtccaaaactcatgtttggggtggtttctcgcaatttcgttatcgcacgtcacccattctgaaaacgggtgtcggggtgcatacaaagcacgagtttttgccgccggaaccatttcttcgtttttggcaacgaacatgcccaatccactaatttaggtccaaaacgcatgtttggggtggttcgcgcaatttcgttgtcgcacgtcacccattccgaaaacgggtgtcgggtgcatagaaagcaagagtttttgccaccggaaccgtttcattgtttttcgcaacgaatatacccaatccactactttaggtccaaaactcatgtttgaggtggtttcgcgcaatttcgttgtcgcacgtcacccattccgaaaactagtgtcggggtgcatacaaagcacgagtttttgccaccggaaccatttcttcgtttttcgcaacgaacatgcccaatccactactttaggtccaaaactcatgtttggggtggtttcgcgcaatttcgttgtcgtacgtcacctattccgaaaacaggtgtcgggtgcatacaaagcacgagtttttgccaccggaaccatttcttcgtttttcgcaacaaacatgcccaatccactactttaggtacaaaactcatgtttggggtggttttgcgcaatttcgttgccgcacgtcacccattctgaaaacggttgtcggggtgcaataaaagcacgagtttttgccaccggaaccatttcttcgttttccgcaacgaacatgcccaatccactactttaggtccaaaactcatgtttggggtggtttcgcacaatttctttgtcgcacgtcacccattccgaaaacgggtgtcggggtgcatacaaagcatgagtttttgccaccggaaccgtttcttcgtttttcgcaacgaatatgcccaatccactattttaggtccaaaactcatgtttcgggtggtttcgcgcaatttcgttgtcgcacgtcacccattccgaaaacgggtgtcggggtgcatacaaagcacgagtttttgccacaggaaccatttcttcgtttttcgcaacgaacatgccaaatccactactttaggtccaaaactcatgtttggggtggtttcgcgcaatttcgttgtcgcacgtcacccattccgaaaacgggtgtggagtgcatacaaagcacgagtttttgccaccggaaccatttcttcgtttttcacaacgaacatgcccaatccactactttaggtccaaaactcatgtttggggtggtttctcgcaatttcgttatcgcacgtcacacatttcgaaaacgggtgtcgggtgcatacaaagcacgagtttttgccaccggaaccatttcttcgtttttcgcaacgaacatgcccaatccactactttaagtccaaaactcatgtttggggtgggttcgcgcaatttcgttgtcgcacgtcacccattccgaaaacgggtgtcgggtgcatagaaagcacgagtttttgccaccggaaccgtttcattgtttttcgcaacgaatatacccaatccactactttaggtccaaaactcatgtttgaggtggtttcgcgcaatttcgttgtcgcacgtcacccattccgaaaactagtgtcggggtgcatacaaagcacgagtttttgccaccggaaccatttcttcgtttttcgcaacgaacatgcccaatccactactttaggtccaaaactcatgtttggggtggtttcgcgcaatttcgttgtcgcacgtcacccattccgaaaacaggtgtcgggtgcatacaaaagcacgagtttttgccaccgggaaccatttcttcgtttttcgcaacgaacatgcccaatccaatactttaggtccaaaactcatgtttggggtggtttcgcacaattttgttgtcgcacgtcacccattccgaaaactggtgtcggggtgcatacaaagcacgagtttttgccaccggaaccatttcttcgtttttcgcaacgaacatgcccaatccactactttaggtccaaaactcatgtttggggtggtttcgcgcaatttctttgtcgcacgtcacccattccgaaaacgggtgtcggggtgcatacaaagcacggatttttgccacaggaaccatttcttcgtttttcgcaacgaacatgccaaatccactactttaggtccaaaactcatgtttggggtggtttcgcgcaattttgttgtcgcacgtcacccattccgaaaacgggtgtggggtgcatacaaagcacgagtttttgccaccggaaccatttcttcgtttttcgcaacgaacatgcccaatccactactttaggtccaaaactcatgtttggggtggtttctcgcaatttcgttgtcgcacgtcacacatttcgaaaacgggtgtcgggtgcatacaaagcacgagtttttgccaccggaactgttgggggccttcggcttccgaaggtcctcaaaaacatgatttaacagtgtttctagagtataatgtgtgaacaggtatcttcggactcgtatcagagagggagaagctcaaaagatacgaaggttgacacagcgccgaagctgtgaagcaggaaagcttcggcatgttcgtagaaaagggaaccgacttgaagatgaaaaggccatttagacctcgatagattactatagaattaccaccaaatgtaaagggcatgtatgtaattttgtatgggttgtaccccgtgcctataaataggtgaacagtacccccgtactgttcacgctgatttggtgttcacttttgcgtcacgcttgtactttcatttccttcaaattggaggtacatctgtaattcaatgttatttttatttatatataataatgatatatgatgatctacgtaattctttatgtttcttgtaattcattcttcgtcaatatgtaatgcatttataaaggttcgccctttgtgaccttcatccgaaaatcattatatcccaagggaaataatgtttcgtaggacgaaggacttaaccgattaacattttctatgttgccttgttcttgaagcatttgagaacaagtccccaacattggcgcccacctccggtgaactcacttccactctttgaagttttttatcttcggcgatcataaaccttcgttatggcgccgaagaaagcttcagcacctgggactgcagctctacaaccgctggaccacaatcaggagacagtctctcttcgggaggcccgaagccggaaaaggaaggctgttagcctgtcaccaccagaggacgagttagatcaagaaatcagagatatggagatgcttcatcaacaagtgcagaggaagaaagaaaagatggccaggctagctgaactacagaggcagatagacgaagcctctgaagaagttcgtcaccttgctcaggatgagcaacaccgaaggcctcagcaccaagaccttcatcaggaggattttcccaacggagatgactggtatgacaatttccatcatgggaattttgtctttgacgatgcttctcctctgtccgctgagctgcaggctacaccttggcctccgtcttacaagcctcctcagcttcccgtattcgatggccactcagacccgaagcagtttttgatgagctacgaggcaacagtatcttcctatggtggcaatgctgcggtcatggccaaatcttttgttatggctgtcagaagtgttgctcaaacctggtattcctcccttcgaccaggaacgatcacttcatggcagaagctgaaggacctcttgttaactagcttccaagggtttcagacgaagccggttactgctcaggctctgttccagtgcacccaggatcacgaagaataccttcaggcgtatgtccgaaggttcttgcgtttgagagcacaggcaccaacggtgcccaatgaaattgtcattgaggccatgatcaaggggcttcggccaggaccgtcagctcagtacttcgccaggaagccccctcaaactttggag

SEQ ID NO: 808 - DNA, 7409 bp, Zea mays
  source: /note="Zea mays BAC clone full insert sequence contig bacm.pk119.a23.fis45"
caatttcgttgcagcacgtcacccattctgaaaacggttgtcggggtgcatataaaacacgagtttttgccaccggaaccgtttcttcgtttttcacaacgaacatgcccaatccactactttaggtacaaaactcatgtttggggtggtttcgcgcaatttcgttgccgcacgtcacccattccgaaaatgggtgtcgggtgcataaaagcacgagtttttgccaccggaaccatttcttcgtttttcgcaacgaacatgccccatccactactttaggtccaaaactcatgtttggggtggtttcgcgcaatttcgttgtcgcacgtcacccattccgaaaacgggtgtcggggtgcatacaaagcacgagtttttgccagcggaaccatttcttcgtttttcacaacgaacatgcccaatccactactttaggtccaaaactcatgtttgagggggtttcgcgcaatttcgttgtcgcacgtcacccattctgaaaacgggtgtcggggtgcgtacaaagcacgagtttttgccaccggaaccatttcttcgtttttcgcaacgaacatgcctaatccactactttaggtccaaaactcatgtttggggtggtttcgcagaatttcgttgtcgcacgtcacccattccgaaaacggttgtcggttggatacaaagcacgagtttttgccaccggaaccatttcttcgtttttcgcaacgaacatgcccaatccactactttaggtccaaaactcatgtttggggtggtttctcgcaatttcgttgtcgcacgtcacccattccgagaacgggtgtcgggtgcatacaaagcacgagtttttgccaccggaaccatttcttcgtttttcgcaacaaacatgcccaatccactactttagctccaaaactcatgtttggggtggtttcgcgcaatttcgttgtcgcacgtcacccattccgaaaacgggtgtcggggtgcatacaaagcacgagtttttgccaccggaaccatttcttcgtttttcgcaacgtacatgcccactttaggtccaaaactcatgtttgaggtggtttcgcgcaatttcgttgtagcacgtcaaccattctgaaaacgggtatcggggtgcatacaaaggacgagttttcgccaccagaaccatttcttcgtttttcacaacgaacatgcccaatccactactctaggtccaaaactcatgtttggggtgatttcgcgcaatttcgttgccgcacgtaacccattccgaaaacgggtgtcggatgcataaaagcacgagtttttgccaccggaaccatttctttgtttttcgcaacgaacatgcccaatccactactttaggtccaaaactcatgtttggggtggtttcacgcaatttcgttgccgcacgtcacccattctgaaaacgggtgtcggggcgcgtacaaagcacgagattttgccaccggaaccatttcttcgtttttcgcaacgaacacgcccaatccactactttaggtccaaaactcatgtttggggtggtttcacgcaatttcgttgccgcacgtcacccattctgaaaacgggtgtcggggtgcgtacaaagcacgagtttttgccaccggaaccatttcttcgtttttcgcaacgaacatgcctaatccactactttaggtccaaaactcatgtttggggtggtttcgcagaatttcgttgtcgcacgtcacccattccgaaaacggttgtcggttggatacaaagcacgagtttttgccaccggaaccatttcttcgttttcgcaacgaacatgcccaatccactacttcaggtccaaaactcaagtttggggtggtttcgcgtaatttcattgtcgcacgtcacccattccgaaaacgggtgtcggggtgcatacaaagcacgagtttttgccagcggaaccatttcttcgttttttcgcaacgaacatgcccaatccactactttaggtccaaaactcatgtttgagctggtttcgcgcaatttcgttgtcgcacgtcacccattctgaaaacgggtatcggggtgcataaaagcacgggtttttgccaccggaaccatttcttcgtttttcgcaacgaacatgcccaatccactatttaggtccaaacgtttggggtgctttcgcacaatttttgtcgcacgtcacccattccgaaaacgggtgtcgggtgcatacaaagcacgagtttttgccaccggaaccatttctttgtttttcgcaacgaacatgcccaatccactactttaggtccaaaactcatgtttggggtggtttcacgcaatttcgttgccgcacgtcacccattctgaaaacgggtgtcggggtgcatacaaagcacgagtttttgcctccggaaccatttcttcgtttttcgcaacgaacatgcccaatccactagtttaggtccaaaactgatgtttggggtggtttcgcgcaatttcgttgtcgcacgtcgcccattccgaaaacgggtgtcgggtgcatacaaagcacgagtttttgccaccggaaccatttcttcgtttttcgcaacgaacttgcccaatccactactttaggtccaaaactcatgtttggggtggtttcgcacaatttcgttgtcgcacgtcacccattccgaaaacaggtgtcgggtgcatacctgtctcttatacacatctcaaccctgaagctcttgttggctagtgcgtagtcgttggcaagctctagaggatccccacggcttcccgtgggacgtgtagcagcacgcaagcacttctcaatgcagcaggcacaggatgcccgcacgaacgatgggacacgggcgccgggagtcggctgcacggcagcgggggtcctccaagcagtcacgggtccaagacaactcatgcgccagcgtagccgctacggtcgagccatccaaagcatccctccgcgctgggcgcggcgggtctacttgcgaggacggcgaccgaaggtccaccgagcacgggagaaatggaaaacgcatcgagcaacgggccatcccacagtgcagccactcgtccagggcgtctggccggcgctagccagccatagccggtcgtggctgcgtcacggccgaaccatggccggccaggcagccaacagcgccagctggagctgggcgcggtagggtgctgaccggccacggctaggccgcgagggggtgcggggctcggccgaggagacctggaggagacgctggaaacgctatggtttcagcagcgttccgcccgggtttcggctgcacgagttccctaccccctactatacctgaggggcataccccctcccaggacttcggggagttcagccttcagaaaaccagggtattttccctggacgccacgaaacccatctaagatggccggacacaacgtttttgctcagaatcaggggtttcgctagcgtgacccgttttccctcacgggtcgacccgaacttcgatgtctcacgcggggggaccacgggagggtcccgtgcccttccacgtgcccgtttttgcggccgtggccgaaaatccgtttttggcccgtgcgccatggcgaacccctcgttttcagcccaaacgcaaggccgaacagccctgccacccgtggcagcgcgcctccgagccgttttccctccgttccaccgtgcccttcactcaagacatgcactttaggttcggtgtctttccacatgcttggacttagcttattttcggggtcgtgcccgagcctcagttttcggcccgtgcgccatggcgaacccctcgttttcagcccaaacgcaaggccgaacagccctgccgcctgtggcagcgcgcctcctcccgttttccctccgttccaccttgcccttcactcaagacatgcactttaggttcggtgtctttccacatgcttggacttagcccgtttttgcggccgtggccgaacctcagttatcagcccgcgcgccatggcgaacacctcgttttcagcccaaacgcaaggccgaacagccctgccgcccgtggcagcgcgcctcctcccgttttccctccgttccaccttgcccttcactcaagacatgcactttaggttcggtgtctttccacacgcttggacttagcccgttttcgcggccgtggccgaacctcagttttcagcccgcgcgccatggcgaacacctcgttttcagcccaaacgcaaggccgaacagccctgccgcccgtggcagcgcgcctcctcccgttttccctccgttccaccttgcccttcactcaagacatgcactttaggttcggtgtctttccacacgcttggacttagcccgttttcgcggccgtggccgaacctcagttttcagcccgcgcgccatggcgaacacctcgttttcagcccaaacgcaaggccgaacagccctgccgcccgtggcagcgcgcctcctcccgttttccctccgttccaccttgcccttcactcaagacatgcactttaggttcggtgtctttccacatgcttggacttagcttattttcggggtcgtgcccgagcctcagttttcggcccgcgcgccatggcgaacacctcgttttcagcccaaacgcaaggccgaacagccctgccgcccgtggcagcgcgcctcctcccgttttccctccgttccaccgtgcccttcactcaagacatgcactttaggttcggtgtctttccacatgcttggacttagcttattttcggggtcgtgccctagcctcagttttcggcccgtgcgccatggcgaacccctcgttttcagcccaaacgcaaggccgaacagccctgccgcccgtcgccacgcgcctgctcccgttttccctccgttccaccttgcccttcacttaagacatgcactttaggttcggtgtctttccacaagcttggacttagctaattttggaggtcgtgcccgagcctccgatttcggcccgtgcgccatggcgaacccctcgttttcagcccatacgcaaggccgaacagccctaccgcccgttgccgcgtgcctccgtgtcgttttccctccgttccaccgtgcccttcaccaaagacatccactttaggttcggtgtgtttccacatgcttggacttagtttattttcgggttcgtgccacagccaccatttccggcccgcgcgccatggcgaaccacctgtttttagcccagacgcattgccgaacagccctgccgcccgtcgccgcgggcctccgtgtcgttttccctccgttccatcttgcccttcacccaagacatacacattagcttcggtgtctttccacacgcttggacttagcttatttccgaggccgtgccccagccgctgttttcggcccacgcgccatggcgaaaccctcgttttcagcccaaacgcaaggccgaacagccatgccgcccgtcgccgcgcgcctccgtgtcgttttccctccgttccaccgtgcccttcacccaagacatacacattagcttcggtgtctttccacacgcttggacttagcttatttccgaggccgtgccccagccgccgttttcggcccgcgcgccatggcgaaaccctcgttttcagcccaaacgcaaggccgaacagccatgccgcccgtcgccgcgcacctcctcccgttttccctccgttccaccttgaccttcactccagacatgcactttaggttcggtgtctttccaaacgctgggacttagcccgttttcggaccgtggccgaaccgttgttttcggaccacgcgccatggcgaacacctcgttttcagcccaaacacaaggacgaacatccctgccgcccgtcgccgtgcgcctccgtgccggagcctcagttcgtcgcgtgcctccgtgtcgttttccctccgttccactgtgcccttcaccaaagacatacactttaggttccgtgtctttccacacgcttggacttagcttattttcgagttcgtgcctgagcctcagttttcggcccgtgcgccatggcgaacacctcgttttcagccaggacgcaaggccgaacagccatgccgcccgtcgtcgcgtgcctccgtgtcgttttccctccgttccaccgtgcccttcactcaagacatacaaacaccttagcttcggtgtctttccattccacacgcttggacttagcttattttcgaggtcatgcccgagcctcagttttcggcccgtgcgccatggcgaacccctcgttttcagcccagacgcaaggccgaacagccctgccgcccgtcgccgcgcgcctccgtgccgttttccctctgttcctccgtgcccttcacccaagacatacatattagcttcggtgcctttccacacgcttggacttagcttattttcggggtcgtgcctgaacctcatttttcggcccgtgcgccatggcgaacccatcgttttcggcccaaacgcaaggccgaacagccatgccgcccgtcgtcgcgcgcctccgtgtcgttttccctccgttccaccgtgcccttcactcaagacatacatacaccttagcttcggtgtctttccattccacacgcttggacttagcctattttcgaggtcgtgccccggtcgccgtttgcggcccgcgcgccatggcgaacccctcgttttcagcctagacgcgtggccgaacagccctgccgcccatcgccaacgttccatcgtgcccttcacccaaggcatacgtaggagcttcggtttctttccacacgctgggacttagcttttcttgtggtcgtgcacgaactcacggcggttttcggcctcttgccacgctgcgccttggacgtttccgttcggaagatcggtgcccctctcccgtgggttcgaaacctagtcgctgggcgctgtgtagagtggggggagggacgaatccgtgcgacgcggggctggatctcagtggatcatggcagcaaggccactctgccacttacaatgccccgtcgcgttttaagtcgtctgcaaaggattcagcacgccgcccgttgggaagggagcttcgaggcggcccgccgcggcgcgtcgaccgggcgggctgagccaatggcacgggcccttggggcgcgaacgccctaacgtgggtcggggcgggcggcgagcagaggcgccggttgctagcttggattctgacttagaggcgttcagtcataatccggcacacggtagcttcgcgccactggcttttcaaccaagcgcgatgaccaattgtgtgaatcaacggttcctctcgtggagcttcggtccgggtcacctttgtccaccaagatggaactgcggccggccgctcattaattaagtcaggcgcgcctctagttgaagacacgttcatgtcttcatcgtaagaagacactcagtagtcttcggcca

SEQ ID NO: 809 - DNA, 11686 bp, Zea mays
  source: /note="Zea mays BAC clone full insert sequence contig bacm.pk119.a23.fis46"
ttcttcgtttttcacaacgaacatgcccaatccactactttaggtccaaaactcatgtttggggtggtttctcgcaatttcgttatcgcacgtcacccattctgaaaacggttgtcggggtgcatacaaagcacgagtttttgccacaggaaccatttcttcgtttttggcaacgaacatgcccaatccactactttaggtccaaaactcatgtttggggtggtttcctgcaatttcgttgccgcacgtcacccattccgaaaacgggtgtcgggtgcatacaaagcacgactttttgccaccggaaccatttcttcgtttttcgcaacgaacatgcccactccactactttaggtccaaaactcatgtttggggtggttttgcgcaatttcgttgtcgcacgtcacccattccgaaaacgggtgtcgggtgcatagaaagcacgagtttttgccaccggaaccgtttcattgtttttcgcaacgaagatacccaatccactactttaggtccaaaactcatgtttgaggtggtttcgcgcaatttcgttgtcgcacgtcacccattccgaaaactagtgtcggggtgcatacaaagcacgagtttttgccaccggaaccatttcttcgtttttcgcaacgaacatgcccaatccactactttaggtccaaaactcatgtttggggtggtttcgcgcaatttcgttgtcgcacgtcacccattccgaaaacgggtgtcgggtgcatacaaagcacgagtttttgccaccggaatcatttcttcgtttttcgcaacgaatatgcccaatccactactttaggtccaaaactcatgtttggggtggtttcgcacaatttcgttgtcgcacgtcacccattccgaaaacgggtgtcggggtgcatacaaagcacgagtttttgccacaggaaccacttcttcgtttttcacaacgaacatgcccaatccactactttaggtccaaaactcatgtttggggtggtttcgcgcaatttcgttgtcgcacgtcacccattccgaaaacggttgtcgggtgcatacaaagcacgagtttttgccaccggaaccatttcttcgttttcgcaacgaacatgcccaatccactactttaggtccaaaactcatgtttggggtggtttcgcgtaatttcattgccgcacgtcaaccattctgaaaacggttgtcggggtgcatacaaagcacgagtttttgccagcggaaccatttcttcgtttttcgcaacgaacatgcccaatccactactttaggtccaaaactcatgtttgaggtggtttcgcgcaatttcgttgtcgcacgtcacccattctgaaaacgggtatcggggtgcataaaagcacgagtttttgccaccggaaccatttcttcgtttttcgcaacgaacatgcccaatccactatttaggtccaaactgatgcggacatcaacaccaacacgagcacatctacaccagcagcaccttctccagcccaggcgccaccccttccacctgggccagtgactcgggcccgtgcaacagaattgaactacatcatgttgttaaagaacgaaggcccggaagaatagacgaccagcccaattgcggcccataatggacgacctagggttggccgcccctaggggctgcgccccctctctatttattcaggagctgcgcctcctttatttccagagttttgttttacgttagccttagctactctcgaacacgcgcaaatctgcgctgtcttcgtgtattcagaactccaccctcgagtaatagattagattgctcgcatcttgttcttgttcgttcttcgattgcgcacaggaaacgatcttcgtgatcaggccgatctcgcatcagcaaggtcggtaaccacagggagttggttcaacgattgcattggcgcctcgggcttgctcgtcgtagtcggatcgcaagggtcatcttccgccaaatcggaattatctctactcgccgaaagatcgggcacctcagcttcatcaattggtatcagatttccaggttgatcggtgagtttatcgagtgtttttttcctacagtccacaaaaccacataaaaattcaggttagatcttatcccagcacccttttgagcctcgcactttctttcaataatctgcattgttgaatttgtgtgctttcgcgtcatttgttgctggttgcattgtgttcttccaccattcaaaccctagcgccgccaccatctcccgtttgatcacgccacaaaccgagtcaacatcgtttccttatttttctccttcggttacgtcaaaaaaaacagaaaaaacaaaccgagtcaacggccgtttccttgattttctccttcggttacgaaaaaaaaacagaaaaaaaaaacaaactgagtcaacggccgcttccttgtttttctccttcggttacgtcaaaaaaacagaaaaaaaagataacgaaggagaaaggatacggttgtttcatcccggtcgtttttagaacataacttgaggtaccttccgtaaaccaggcataacttttcgctcgggtgtccaaaaaatctgaaatttttacaggagcttgttgacaccattctgagcccggccaaactgaccttcggtctgtttggtttcgacaaaattgtcaaaaaaatcaggaaaataaagaaaaaaaattcgtcaaagttctcgcacgcttttcagagaacttcctgattttctatagaccacatctgatatctgttttaggtgaaacttcgtgtagctcctatcttgttgcttcttgtgctgagaaaaatatcaaaaaaatcatacaaaaaagaaaaacaaaatcacctgtgatttctactagtgcctttttggcatcactagtacaatatttacggtactgccattctgctagttccatccatcttttgcacctgtggccagcaatatagtttcgtgttttgcactataattcaactttgcattattgtttgatcgtgctaatccttgacttgagtgcagcctacccacaactccacatatttctacgacgagcaggtttctgtttctccacgcaatcgctcatccaatctttcaccggttccacctgttggttgcagttcaccactgtggcttggtaagaacggataagaacttgataacagcactagtgtgagcgccttgtgagcagtacacccctgtttttgtcgttggtttttctccttttggtgtttgcgctaactatggcaggagcacacgacatggtggatgcccagttgcaggaagtaaggggacaagttgatggacttgctgctgacattaggacgatgcatgaacggcttgattcaacaatcacttcgacgaccgagcgtttcaaccaacttgaccttgctcaaacggcgactcgcaccacactcgacaccatcctggcacgccttgatgcactgaccacaaagatggagcaggaatacggcggtgacactgagcaggacgatggagatcgccgtggtcgtgcacgtcgtgtggttcgtcatccccctaatgacttattttctaagattaaatttaaaattccatcttttaatggtaaatatgatcctgctgcatatcttgattgggaattagaggtagaacagaaattttcatgccatgatattcctgctaatagccaagtgaaggctgccattagtgaatttactgattttgctttaatttggtggcgtgagtataaacaaaaacttcccattaacagtgtcattacttggacccaattaaaaactgccatgcgccacagatttgttccttcctattatgctcgtgatttgcttaacaaaatgcagcgttttcaacaaggttcacagtctgttgaggattattaccaggagttacaaaagggtatgcttcgttgtggtttagttgagtcagatgacgctgctatggcgcgttttcgtggtggtttaaacagggaaattcaggatatacttgattataaggattattttgatataaccacattgtttgaatatgcttgcaaagctgaacgtgaagtgcagggacgacgatcaaagacatatactaactcttttgcaggccggggtccaacacacagctcaactccttccagccctgcacctcctacgcctagcactacatcgcgcacagggccggccaagccagtggcgccccctgccaaaggcgccgcttcttccacaggacgtacacgggatattcagtgccatcgttgcagagggtttgggcacatgattcgggactgcccaaacaagcgtaccttgcttatacgtgacaatggtgagtactcttcagccagtgattctgaggaaactagtcatgctatgattgccactaaccatgcagaaaatgaggaagtccacgttgatcccatcgacgccgataggtatgagagccttgttgtgcagcgtgttctcagcacacaggttgcccaggccgaaaaaaatcagcgacacactctattccataccaagggcgtcgtgcacgaacggtcgattcgcatcatcatcgatagtggcagctgcaacaatttggcaagtacagcgttggtagagaaattatccttgcccactcgcacacatccacatccgtatcacattcaatggcttaatgatggtggtaaaataaaggtaacacgttcggtacgtgtccccttttcgctgggttcttattctgattatgctgattgcgatgttattcctatggaagcatgctctttgttattaggtcgaccttggcaatatgatactgatagtttacatcatggtcgttcaaatcattattctttcatgtttaaaggccagaaaataattatacatccaatgacccctgaccaaattttgaaagatgatcttactagggctgctaaaactgcacaacaagtcaaatcgacatcagccgcacctattaaatctgaaatcaagttgcactctcctgttttacttgctacacgtgctgattttgatgatctccatgaagctcatatgccctgttatgcacttgtatgctcgcgaatgcttgttccgcttgatgatgcaccgtctttggatataccccctgctgttgttaaccttttgcaggagtatgctgatgtttatcctacggacttaccaccgggtcttcctcccctccgtggcattgagcatcagatcgatctcatccccggcgcttctcttccgaaccgcgccccgtaccgtacaaatccagatgagacgaaggagatccagcgccaggtgcagacactgcttgataagggttacattcgtgagtctcttagcccttgctcggttcctgttttactcgtcccaaagaaagatgggtcatggcgtatgtgcgtagattgtcgtgctattaataacatcacagttcgttatcgatatcctattccacgccttgatgatatgctagatgagcttagtggtgccgttattttctctaaggttgatttgcgtagcggttaccatcagattagaatgaaactcggtgatgaatggaaaacggcttttaaaacgaaatttggtttatatgaatggttggttatgccatttggattgactaatgctcccagcacctttatgcgtttaatgaacgaagttctacgggccttcataggtttgtttgttgttgtttatttcgatgatatccttatttacagcaagtctatagaggagcatttagaacatttgcgtgctgtttttgacgctttgcgtgctgctcgcttgtttggtaacatggaaaagtgcacattttgcacgcaacgtgtctcgtttcttggttatgtggttactccgcagggcattgaggtggatagcagcaagattgctgccattcgggagtggcctacaccgacgacggtcacacaaattcggagctttcttggacttgccggtttctaccgcagatttgttcgtgattttagctccattgcagcgcctctacatgagcttacaaagaaagatgtgccgtttgcttggagtgattcgcaggaggtagcgttcagcactttgaaagataagttaacccaagctcccctattgcaattgcctgattttaatgaagtgtttgagcttgaatgcgatgctagcggtattgggctaggtgctgttttgttacaagaaggaaaaccagttgcttattttagtgaaaaattaagcggtgctagtctgaaatattctacttatgataaggagctttacgctttagtgcgcactttgcatacatggcagcactatctttggcatcgtgagtttataatccattctgatcatgaggctttaaaacatattcgtacccaaacaaatctgaaccgtcgtcatgctaaatgggtagaattcattgagtcctttccttacattattaaacacaagaacgggaaggacaatgttattgctgatgctttgtctcgtcgctataccatgctgtcacagttagattttaaaatctttggtttggacactgtgaaggatcaatatgttgacgatgctgattttaaagatgctttcggccattgtattaatgggaaaccatggggcaaatttcacatacaggatgggttcctgtttcgcgctaacaagctgtgtgttccagctagctcggttcgtcttttgttgttacaggaagcgcatggaggcggtctcatggggcattttggagtctacaagacacatgaggtgttggctgcccacttcttttggcctcggatgcgcgctgatgtggagcgccttgttgcacgctgcactacttgtcagaaagctaagtcacggttgaacaaccatggtttgtatatgcctttgcctgtcccttcttctccttggcttgatatctctatggactttgttttggtcttgcctagaactaagaaggggagggatagtatttttgtggttgttgatagattctctaaaatggctcactttataccttgtcataaaactgatgatgctagcattgttgctgaattgttctttagagaaattattcgtttacatggtattccaaaaacaatagtctctgatcgcgatgctaagtttctaagccatttttggagatctctttggaataaattgggaactaaattgttgtttagcactacttgtcaccctcagactgatggacaaactgaggtagtaaatagaactttatctaccatgcttagggctgttttagacaagaatttgagacgttgggaggattgcttgcctcatgttgaatttgcttacaatcatgccacgcattcttctacaaagatgtgccctttccagattgtttatggttacattcctagggcacctattgatttgatttcacttaatgccgcgaacgccccacatgtagatgcttctgcacatgttgaacaaatgattaccatacatgaacaaacgaaacagaacattgctgctactaatacaaaaaatcaggttgctggtagtaaaggaagaaaacatgttacttttgaacctggtgatatggtttggttgcatttgagaaaggatcgttttcctactttgcgccgttctaaattgatgcctcgtgctgctggtccttttaagatactaaccaagattaatgataatgcttataccctcgacctacctgcggagtttggtgtttccactagttttaatgttgcagatttgaaaccgtatgtgggacaagatgaggagttgtcgtcgaggacgacttcagttcaagaaggggaggatgatgcggacatcaacaccaacacgagcacatctacaccagcagcaccttctccagcccaggcgccaccccttccacctgggccagtgactcgggcccgtgcaagagaattgaactacatgatgttgttaaagaacgaaggcccggaagaatagacgaccagcccaattgcggcccataatggacgacctagggttggccgcccctaggggctgtgccccctctctatttattcaggagctgcgcctcctttatttccagagttttgttttacgttagccttagctactctcgaacacgcgcaaatctgcgctgtcttcgtgtattcagaactccaccctcgagtaatagattagattgctcgcatcttgttcttgttcgttcttcgattgcgcacaggaaacgatcttcgtgatcaggccgatctcgcatcagcaaggtcggtaaccacagggagttggtttagcgattgcattggcgcctcgggcttgctcgtcgtagtcggatcgcaagggtcatcttccgccaaatcgaaattatctctactcgccgaaagatcgggcacctcagcttcatcacaaacgtttggggtggtttcgcacaatttttgtcgcatgtcacccattccgaaaacgggtgtcgggtgcatacaaagcacgagtttttgccaccggaaccatttctttgtttttcgcaacgaccatgcccaatccactactttaggtccaaaactcatgtttgggtggtttcgcacaatttcgtcgccgcacgtcacccattctgaaaacgggtgtggggtgcatacaaagcacgagtttttgccaccggaaccatttcttcgtttttcgcaacgaacatgcccaatccactactataggtccaaaactcatgtttgaggtggtttcgcgcaatttcgttgtcgcccgtcacccattctgaaaacgggtatgcacgaaagcacgagtttttgccagcggaaccatttcttcgtttttcgcaacgaacatgcccaatccactactttaggtccaaaactcatgtttgaggtggtttcgcgcaatttcgttgtcgcacgtcacccattctgaaaacgggtatcggggtgcataaaagcacgagtttttgccaccggaaccatttcttcgtttttcgcaacgaacatgcccaatccactatttaggtccaaaactcatgtttggggtggtttcgcacaatttcgttgtcgcacgtcacccattccgaaaacgggtgtcgggtgcatacaaagcacgagtttttgccaccggaaccatttctttgtttttcgcaacgaacatgcccaatccactactttaggtccaaaactcatgtttgggtggtttcgcacaatttcgttgccgcacgtcaccctttctgaaaacgggtgtgggggtgcatacaaagcaagagtttttgccagcggaaccatttcttcgtttttcgcaacgaacatgcccaatccactactttaggtccaaaactcatgtttgaggtggtttcgcgcaatttcgttgtcgcacgtcacccattctgaaaacgggtatcggggtgcataaaagcacgagtttttgccaccggaaccatttcttcgtttttcgcaacgaacatgcccaatccactatttaggtccaaaactcatgtttggggtggtttcgcacaatttttgtcgcacgtcacccattccgaaaacgggtgtcgggtgcatacaaagcacgagtttttgccaccggaaccatttctttgtttttcgcaacgaacatgcccaatccactactttaggtccaaaactcatgtttgggggggttcgcacaatttcgttgtcgcacatcacccattccgaaaacgggtgtcggggtgcatacaaagcacgagtttttgccacaggaaccatttctttgtttttcgctacaaacatgcccaatccactactttaggtccaaaactcatgtttgaggtggtttcgcgcaatttcgttgtcgcacgtcacccattctgaaaacgggtatcggggtgcataaaagcacgagtttttgccaccggaaccatttcttcgtttttcgcaacgaacatgcccaatccactactttaggtccaaaactcatgtttggggtggtttcacataatttcgttgtcgcacgtcacccattccgaaaacgggtgtcgggtgcatacaaaacacgagtttttaccaccggaaccattttttcgtttttcacaacgaacatgcccaatccactactttaggtccaaaactcatgtttggggtggtttcgcgcaatttcgttgccgcatgtcacccattctgaaaacggttgtcggggtgcatacaaagcacgagtttttgccaccggaaccatttcttcgtttttcgcaacgaacatgcccaatccactactttaggtataaaactcatgtttggggtggtttcgcgcaatttcgttgtagcacgtcacccattccgaaaacgggtgtcgggtgcatacaaagcacgagtttttgccaccggaatcatctcttcgtttttcgcaacgaatatgcccaatccactactttaggtccaaaactcatgtttggggtggtttcgcgcaatttcgttgtcgcacgtcacccattccgaaaacgggtgtcggggtgcatacaaagcacgagtttttgccaccggaaccatttcttcgtttttcgcaacgaacatgcccaatccactcctttaggtccaaaactcatgtttggggtggtttcgcacaatttcgttgtcgcacgtcacccattccgaaaacgggtgtcgggtgcatacaaagcacgagtttttgccagcggaaccatttctttgtttttcgcaacaaaaatgcccaatccactactttaggtccaaaactcatgtttgaggtggtttcgcgcaatttcgttgtcgcacgtcacccattctgaaaacgggtatcggggtgcataaaagcacgagtttttgccaccggaaccatttcttcgtttttcgcaacgaacatgcccaatccactatttaggtccaaaactcaagtttggggtggtttcgcacaatttttgtcgcacgtcacccattccgaaaacgggtgtcgggtgcatacaaagcacgagtttttgccaccggaaccatttctttgtttttcgcaacgaacatgcccaatccactactttaggtccaaaactcatgtttgggtggtttcgcacaatttcgttgtcgcacgtcacccattccgaaaacgggtgtcggggtgcatacaaagcacgagtttttgccaccggaaccatttctttgtttttcgcaacgaacatgcctaatccactactttaggtccaaaactaatgtttggggaggtttcgcgcaatttcgttgtcgcacgtcacccattccgaaaacgggtgtcggggtgcatacaaagcacgagtttttgccaccggaaccatttcttcgtttttcgcaacgaacatgcccaatccactactttaggtccaaaactcatgtgtggggtggtttcgcgcaatttcgttgtcgcacgtcacctattccgaaaacaggtgtcgggtgcatacaaagcacgagtttttgccaccggaaccatttcttcgtttttcgcaacgaacatgcccaatccactactttaggtacaaaactcatgtttggggtggttttgcgcaatttcgttgccgcacgtcacccattctgaaaacggttgtcggggtgcatacaaagcacgagtttttgccaccggaaccatttcttcgttttccgcaacgaacatgcccaatccactactttaggtccaaaactcatgtttggggtggtttcgcacaatttctttgtcgcacgtcacccattccgaaaacgggtgtcggggtgcatacaaagcatgagtttttgccaccggaaccgtttcttcgtttttcgcaacgaatatgcccaatcc

SEQ ID NO: 810 - DNA, 22801 bp, Zea mays
  source: /note="Zea mays BAC clone full insert sequence contig bacm.pk119.a23.fis47"
caagccctcggacccggccaaacttcaccggaggcccgagatcgacctcaccggacttcggtcttccgccgccgcgcgtggaccgagctatctagtgagtctccgcccaattccttgcgctcatgtcttctctggcatcccgtggacctccctgacccatctgattgaactatctcgccgtgaccaggccggtctcctcgccgccgacgagcatccccgcctgcgcgcgtggaccgaccggctccggccatctccgacggtgtcccgcacaccgttgtgatccccgagacctccccttcgtcctcgaccacttcaccggagccatctcgccgccggtaagcccctccgccctttcttccgccgcggttactgtttaaggtagaagaaggacctcgggttaggatttgtagaacccgaggggttttctgtaacgtcagtgactcatgtgaatagtagcttaaggactgatccgcgaagaaaacttaaaaacccgccagggacccagtgcaaagtagttttccatttaaccaattctgttattctttttaaaatgaccagagaacttagaaaacccataacttgatgaattcttcataaaaaagttgccaaaccaattttgctagctcctgaatattatgaactatcatttaaaaataataaaccctatgctttctgttctaaattttagagtttgattttaaaaacagaaacccaccaaaccttgtttaattaaggaaaattagtttttcttctgtgctgaacttaagaaaatttgtagatgttcaaaccttatttagacactgtttaaaaatagtaggaaccccagcattagaaattatgatgtagttattcatttaaagctattttgtccaaaacttagagaaaatcagaagggcattagaaattaatgaacagtgattaagattatttttcctagtttttacttatgtaacagagaacttaggaaaaatacagagaccattaatttggaccagtttttaattaaaatgatttagttagccttatatagactgaaaatcaattattagagaggcaaaactataaccaaaatgaataataaaaatctagtggacttccaacacctagagccccactacaaaaataaagagcacctcagcccaactttttaagtaaggaaaataaatacaaagtgataataaggcattttccaaataaatcatgaacaacccctattaatgtgatattgggcaaccaaaaatttgctaagtccatgatgagataaaccaccagagaaaaatgccaacccatgaaaaggaagcaaactcataccatttgctaatgatttaagagaaaggccaattaattcaaataatgcataccaccccttcccttaagcaaaaagatgccaaacttcagaatgattgctcttgcacaaaataataactaagaaaaataagaactctgttgtttgatgcttttcaaatatagtggtagtagaaagcacccatttggctagaaacttgagaaaaccatagaaaataattaaaaagtattaatgattagaaatttgtatcaagccatgttataacacctaaaagccagcaaaaatgagttttggaggatgacccactgttaaataatagttgtagttcaaatcaccccttctgccctagaatttaataattttgtccagagaaaactattcactttctaatccccaaaatttgagacagagaaacacacaccagtaacaagccactgtaatttttgcagaatttatagaattttataaaagcaacttgtagttcaaacctacttccaaacattaaagagaataaaagaaaaggaaagaagaaataaaccccacctcagtaaatctaacttgagtacttatcaattctcactaagacttaaaaggaattcagtggaaccccaaaattttaatctacttaccttagctaagtttaaaccaatttaccaagtatacaacccaagggtcttacataagtaaagttaaccttgtttaactcaaataatcatgcacccttaaagttgtgatttctaaaagcacatgtcatatcatgcatatatcttacgcattgcattcattagattgtaatcttgccgacggagagtacgtgctcatccccgagcaaggacctgtccaagaggaggaccaggagcaggcttcaaagactgctattgaggatctccccgcaggcccagcaattgaaggcaagcctcggttttatgcataacctgttaattatgctattttacttcacttaatgcttgtaggattgcaatgtgcacttaagtataggagttgcttgaaacctctagttgcatgaacttaggattccttttgagataaatactagtatgctaggtcgagtagctgcttgctaatcaggatctcggtagaagtcgagtgatttttctagcactcgcgcgaggtcaggaattgattgtattcatcttgataatgggatatatgttggtctatggacttggatccagggaggatgccttgtccatgagacgggaaaaatggattaaggattaatgtgtggatacctgagtcaagcttttgaacgtactaagcacatgccgggaaaaatggtaaccgggaaacctagtacctgattgaagccgggtgcggactttatccctcatgcgacctgagactgggtctcccatgctagctatggtgggtacaagtgcggccactgcacgacggcagtcggggtcagtggagcattgtatgccaaggcggtgaggcctggacacgaacggggaatcgatggggacggttgtcatgtgtggggtcggagtaccctgacatgccgtgtgtttaggtttaccttgcaaggttaaaactcgattcgaatcgtctgcttctcggagctaatgagactgcttgattccttgtactgcatcgagtaagaagtgaaatgtggttacatgagataacttgttgattgaactaaatgcttgttaccatgtctgcttaaaagaagcaaatctagctaagttaatgatggtagaatttgaaaagctaaaaattgattttagaaacagctagtgcttttggcaaaccaaacccctcagccaaacagctgcatagtctagaggtagaggagtagactcctcacaccggttaagtctagctgagtattagtatactcagccttgcttgtggcaccatttttgcaggtaccattcaggatatggttgatggtgtgacttggcctaccaccctgccaccgggttggacggtcgagtgggatgttgctccgactagagaggagcatgaggaatagtgggctaggccttgcccatttcctcattaccgacgacatcgattatccgctgcactttattttgtgaactttatttgctacgcaaaaactctgatttatgtaataactcagtacttaatttgtggttttctgttttattgtatttcttctgtgactcaccttcgagtgagattgtggaatttgatcctgattaagtggctctatcagactagatctgaagaactgacgggttattccgatttgagtgtgttacggcccctgaggcgtgactgaggcacttaagctggaataattcgggtggttctgccacagctggtatcggagcaaattccaccacagagaaggacaataagccatgaataccaattttcaaaatctaaaacttgcctagaaactactacagatcgtcaagactagaccgctagacctaggacgaaaggccttaggcatagagggagaaataggtggctaactaagtaggccccgtgatgaagctgaggtgcccgatctttcggtgagtagagataattccgatttggcggaagatgacccttgcgatccgactacgacgagcaagcccgaggcgccaatgcaatcgctgaaccaactccctgtggttaccgaccttgctgatgcgagatcggcctgatcacgaagatcgtttcctgtgcgcaatcgaagaacgaacaagaaaaagatgcgagcaatctaatctattactcgagggtggagttctgaatacacgaagacatcgcagatttgcgcgtgttcgagagtagctaaggctaacgtaaaacaaaactcaagaaataaaggaggcgcagctcctggataaatagagagggggcgcagcccctaggggcggccaaccctaggtcgtccattatgggccgcagttgggctggtcgtctattcttccgggccttcgttctttaacagcataatgtagttcaattctcttgcacgggcccgagtcactggcccaggtggaaggggtggcacctggactggggaagatggtgcctgggctggagaaggtgctgctggtgtagatgtgctcgtgttggtgttgatgtcctcatcatcctccccttcttgaactgaagtcgtcctcgacggcaactcctcgtcttctcccgcatacggtttcaaatctgcaacattaaaactagtggaaacaccaaactccgcaggcaggtcgagggtataagcattatcattaatcttggttagtatcttaaaaggaccagcaggacgaggcatcaatttagaacgacgcaaagtaggaaaacgatcctttctcaaatgcaaccaaaccatatcaccaggttcaaaagtaactagtttccggcctttactaccagtaatctgatatttagcattagcagcagcaatgttttgttgagtttgttcatggagattaatcatttgttcaacatgtgcaagagcatctatgtgtggggcgtccgcagcatcatgcgaaaacaaagcaataggcgccctaggaatgtaaccataaacaatttgaaaagggcacatctttgtagaagaatgggttgcatgattataagcaaactcaacatgaggcaagcaatcctcccaacgtttcaaatttttgtctaaaacagccctaagcatggtagacaaagttcgattaactacctcagtttgaccatcagtctgagggtgacaagtggtgctaaacagcaatttagttcccaatttattccacagagatctccaaaaatgactcagaaacttagcatcacgatccgagactattgtattgggaataccgtgcaaacgaataatctctctaaaaaacaattcaacaacattgctagcatcatcagtcttatgacaaggtatgaaatgagccattttggagaatcgatcaacaaccacaaaaatgctatccctccccttcttagttctaggcaatcccaaaacaaaatccatcgaaatatcaatccaaggggaagtaggaacaggcaaaggcatatacaaaccatggttgttcaaccgtgacttagctttctgacaagtagtgcagcgtgcaacaaggcgctcaacatcagcgcgcatccgaggccaaaagaagtgggcagccaacacctcatgtgtcttgtagacgccaaagtgccccatgagaccgcctccatgtgcttcctgtaacaacaaaagacgaaccgagctagctggaacacacagcttgttagcgcgaaacaggaacccatcctgtatgtgaaatttgccccatggtttcccattaatacaatggccgaaagcatctttaaaatcagcatcatcaacatattgatctttcacagtgtgcaaaccaaagattttaaaatctaactgtgacagcatggtatagcgacgagacaaagcatcagcaataacattgtccttcccgttcttgtatttaataatgtaaggaaaggactcaatgaattctacccatttagcatgacgacggttcagatttgtttgggtacgaatatgttttaaagcctcatgatcagaatggattataaactcacgatgccaaagatagtgctgccatgtatgcaaagtgcgcactaaagcgtaaagctccttatcataagtagaatatttcagactagcaccgcttaatttttcactaaaataagcaactggttatccttcttgtaacaaaacagcacctagcccaataccgctagcatcgcattcaagctcaaacactttattaaaattaggcaattgcaataggggagcttgggttaacttatcattcaaagtgctgaacgcttcctcctgggaatcactccaagcaaatggcacatctttctttgtaagctcatgtagaggcgctgcaatggagctaaaatcacgaacaaatctgcggtagaaaccggcaagtccaagaaagctccgaatttgtgtgaccgtcgtcggtgtaggccactcccgaatggcagcaatcttgctgctatccacctcaatgccctgtggagtaacaacataaccaagaaacgagacacgtcgtgtacaaaagatgcatttttccatgttagcaaataactgggcagcacgcaatgcatcaaaaacagcacgtaaatgttccaaatgctctttcttagatttgctttaaataagaatatcatcaaaataaacaaccacaaacaatcctatgaagggccttagaacttcattcatcactcgcataaaagtgctgggagcattagtcaatccaaacggcataaccaaccattcatataaaccaaatttcgttttaaaagccgttttccattcatcacccagtttcattctaatctggtggtaaccactacgcaaatcaatcttagtgaaaataatggcaccactaagctcatctagcatatcatcaaggcgtggtataggatatcgataacgaatagtgatgttattaatagcacgacagtctacacacatacgccatgacccatctttcttgggaacaagtaacacaggaacagagcaagggctaagagactcacgaatgtatcccttgtcaagcaacgcctgtacctggcgctgaatctccttcgtctcatccggatttgtacggtacggtgcgcggttcggaagctgtgcgccgggaatgaggtcgatctggtgctcaatgccacgaagtggtgggagacccggtggtaagtctttgggaaagacatcagcgtactcctgcaaaaggttagcaaccatagggggaatagccaaagatggtgcatcatcaagtgaaatgaggacactagagcatataagtgcatagcatggcaaatgagcaccgtgtagatcatcaaaatcagcacgtgtagcaagtaaaacaggagccttcaacttgatttcagaaggaacagagggcgatggatcaagttgtttagcagttatagcagctcgggcaagatcatctttaacaatttgttcaggtgtcattggatgtataattattttttgacccttaaaaatgaaagaataatgattcgaacgaccatgatgcaagctatcagtatcatattgccaaggtcgaccaagtaacaaagagcatgcttccatgggaataacatcacaatcaacaaaatcagaataagcacccatggagaaaggaacacacacggaacgtgtgatttttattttaccaccatcattaagccattgaatgtgatatgggtttggatgcttacgagtgggtaacgataacttttcgaccagcatggtactcgccaaattgttgcaactgccactgtcgataatgatgcgaattgaccgctcctgcacaacaccctttgtatggaacagagtgtgtcgctgattcttctcgggcaaagcgacctgtgtactgagaacacgctgcacaacaagactttcatacctatcagcgtcgctcgggttaacatgtacctccgccttagctgcatggtcagtggcaagtagtgcatgttcaatttcttcagaatcactagccgaagagtactcaccatcgtcacgaatgagcaaagtgcgcttgtttgggcagtcccgaatcacatggccaaatcctctacagcgatgacactgaatatcccgtgtatgacctgtgggtggggcagtgctggctggtttggtcgtcttctcgcgtggagtagtggtggacgtggatggcgcagggggatctggtgctgaggtggatgtcgagcttcgtcctgcaaaagggttagaatatggcttcgagcggcgtccctgcacttcacgttcagcttgcaagcatattcaaataaagtagtcatatcataatattccttataatcaagtatatcttggatttcgcggtttaaaccaccacgaaaacgtgccatagcagcgtcgttgtcctctaatatcccacaacgaatcatacctttttgtaactcctggaaatagtcctcaacagattgagaaccttgctgaaaacgctgcattttattaagcaaatcacgagcataatacgaaggcacaaatcgatgtcgcatcgcagctttcaactgatcccaagtggttggaatggtagtgggatgttttattttaaactcacgccaccaaattaaagcaaaatcagtaaattcactaatagcagctttaacctgagaatgtgcagcaatatcatggcatgaaaatttttgttcaacctctaactctcaatcaagatatgcagcaggatcatatttgccattaaaaggtggaattttaaatttaatcttagaaaataagtcattagggggatgacgaaccacacggcgtgcacgaccacggcgatctccatcttcccactcagtgtcaccacagtagtcctgctccatctttgtggtcaacgcatcaaggcgtgccaggatggtgtcgagtgtggtgcgagtcgctgtttgagcaaggtcaagctggttgaaacgctcagtcgtcgaagtgaccgttgaatcaagccgttcatgcatcgtcctaatgtcatcaacaagtccatcaacttgtccccttacttccagcaactgggcatccaccgtgtcgtgtgctcctgccatagttagcgcaaacaccaaaacaccaaaagaagaagaaaaaaaaacaacgacaaaaacaggggtgtactgctcacaaggcgctcacactagtgctgttatcaaattcttatccgttcttaccaagccacagtggtgaactgcaaccaacaggtggaaccggtgaaagattggatgagcgattgcctggagaaacagaagcctgctcgtcgtagaaatatgtggagttctgggtaggctgcactcaagtcaatgattagcacaatcaaacaataatgcaaagttgaattatagtgcagaacacgaaactatattgctggccacaagtgcaaaggacggatggaactagcagaatggcagtaccgtaaatattgtactagcgaggccactagtaggaatcacaagtgattttgtttttcttttttgtatgatttttttgatatttttctcagcacaagaagcaacaaaataggagctagacgaagtttcaccgaaaacagagatcagatgtggtctacaaaaaatcaggaagttctctgaaaagcgtgcgagaactgtgacagatttttttctttattttcctgaatttttttgacaattttgtcgaaaccaaatagaccgaaggtgagtttggccggcctcagaatggtgtcaactagctcctgtaaaaatttcagattttttggacacccgagcgaaaagttatgcccggtttaaggaaggtacctcaagttatgttttcaaacgaccgggatgaaacaactgtatcctttctccttcgttgttttttgtttctgtttttttttgacgtaaccgaaggagaaaaacaaggaaacgatgttgactcggtttgtttttttttgttttttttcgtaaccgaaggagaaaaacaaggaaacgaccgttgactcggtttgttttttctgttttttttgacgtaaccgaaggagaaaaacaaggaaacgatgttgacttagtttgtggcgtgatcaaagggaagatggtggcggcgctagggtttgaatggtggaagaacacaatgcaaccagcaacaaatgacgcgaaagcacacaaattcaacaatgcagattattgaaagaaagtgtgaggctcaaaagggtgttgggataaggtctaacctgaatttttatgtggttttgtggactgtaggaaaaaaacactcgataaactcatcgatcaacctggaaatctgataccaattgatgaagctgaggtgcccgatctttcggcgagtagagataattccgatttggcggaagatgacccttgcgatccgactacgacgagcaagcccgaggcgccaatgcaatcgctgaaccaactccctgtggttaccgaccttgctgatgcgaagatcgtttcctgtgcgcaatcgaagaacgaacaagaaaaagatgcgagcaatctaatctattactcgagggtggagttctgaatacacgaagacagcgcagatttgcgcgtgttcgagagtagctaaggctaacgtaaaacaaaactcaagaaataaaggaggcgcagctcctggataaatagagagggggcgcagcccctaggggcggccaaccctaggtcgtccattatgggccgcagttgggctggtcgtctattcttccgggccttcgttctttaacagcataatgtagttcaattctcttgcacgggcccgagtcactggcccaggtggaaggggtggcgcctggactggggaagatggtgcctgggctggagaaggtgctgctggtgtagatgtgctcgtgttggtgttgatgtcctcatcaccccgtgggccagtacttatattttaaggatgccctaaaaagcaccctattttcttttgagaggcgacgtttcttccagcatgcatgcattataaaacataaagaggaattaaaattttgagctaaccccctgtcttaaaatcatccgggctctctttttctttttccttccaccataatctttatctttgattcccttccgcagatgaattcacccacccccaccagtggaggagactctcgtttcagttctgatttcctttctcgcgatggctttccttccatcttgtgggaagtgcttaactccgccggttaccctacgccccctttgtacacggtgcagttgtatgaggagcatcgggtacctcgttgtcgggtctggctgactttggaggctcatccccttcagtcgggttggcattctcttgactctgagacgattggactcaggacggacgacaccgttgaggcagcagccatgaagactctgacgactttctgtggctaccatcccctggagatggtgatgcaccccttgggactcttccctgctgaaaagaaggatgatcccatgtggtgtaaccgtgtgagccatgtgaaggatgtgtgggcaatgtatcctgacttggttgggagggtcactgttcagtgcatgagtgcgctgtaccgccttcaagcccttcagagcgatgctatggcacttcttgctaacaccgctcaaactgccaagctcactctcgacagtcgggaagattttgtggtcgacctatccacagaattggtggagaaggatctgcaggtggaaaggctgagccagcgcattgccaccttggagcagcaggtggagatccgagacaacactatcgatgtcttggagaaccagcttcacgatgtgcagagggaactcgaagaggcaaatgaccacttggacatgcaccacctggagatggaggccaataaagcaggatgcgagggagaagaggctcccgaggagctaggaccagcccctggtgcctatgggactacctccgtgatgcctcctgatgtagctgaggtgcccgatctttcggcgagtagagataattccgatttggcggaagatgacccttgcgatccgactacgacgagcaagcccgaggcgccaatgcaatcgctgaaccaactccctgtggttaccgaccttgctgatgcgagatcgacctgatcacgaagatcgtttcctgtgcgcaatcgaagaacgaacaagaaaaagaggcgagcaatctaatctattactcgagggtggagttctgaatacacgaagacagcgcagatttgcgcgtgttcgagagtagctaaggctaacgtaaaacaaaactcggaaaataaaggaggcgcagctcctgaataaatagagagggggcgcagcccctaggggcggccaaccctaggtcgtccattatgggccgcaattggtctggtcgtctattcttccgggccttcgttctttaacaacatgatgtagttcaattctcttgcacgggcccgagtcactggcccaggtggaaggggtggcgcctgggctagagaaggtgctgctggtgtagatgtgctcgtgttggtgttgatgtccgcatcatcctccccttcttgaactgaagtcgtcctcgacggcaactcctcatcttctcccgcatacggtttcaaatctgcaacattaaaactagtggaaacaccaaactccgcaggcaggtcaaggatataagcattatcattaatcttggttagtaccttaaaaggaccagcagcacgaggcatcaatttagaacggcgcaaagtaggaaaacgatcctttctcaaatgcaaccaaaccatatcaccaggttcaaaagtaacatgttttcttcctttactaccagcaacctgattttttgcattagtagcagcaatgttctgtttcgtttgttcatgtatggtaatcatttgttcaacatgtgcagaagcatctacatgtggggcgttcgcagcattaagtgaaatcaaatcaataggtgccctaggaatgtaaccataaacaatctggaaagggcccatctttgtagaagaatgcgtggcatgattgtaagcaaattcaacatgaggcaagcaatcctcccaacgtctcaaattcttgtctaaaacagccctaagcatggtagataaagttctatttactacctcagtttgtccatcagtctgagggtgacaagtagtgctaaacaacaatttagttcccaatttattccaaagagatctccaaaaatggcttagaaacttagcatcgcgatcagagactattgtttttggaataccatgtaaacgaataatttctctaaagaacaattcagcaacaatgctagcatcatcagttttatgacaaggtataaagtgagccattttagagaatctatcaacaaccacaaaaatactatccctccccttcttagttctaggcaagcccaaaacaaagtccatagagatatcaaggcaaggagaagaagggacaggcaaaggcatatacaaaccatggttgttcaaccgtgacttagctttctgacaagtagtgcagcgtgcaacaaggcgctcaacatcagcgcgcatccgaggccaaaagaagtgggcagccaacacctcatgtgttttgtaaacgccaaaatgccccatgagaccgcctccatgtgcctcctgtaacaacaaaagacgaaccgaactagctggaacacacagcttgttagcgcgaaacaggaacccatcctgtatgtgaaatttgccccatggtatcccattaataaaatggccgaaagcatctttaaaatcaacatcgtcaacatattgatccttcagagtgtccaaaccaaagattttaaaatctaattatgacagcatggtatagcgacgagacaaagcatcagcaataacattgtccttcccgttcttgtgtttaataatgtaaggaaaggactcaatgaattcgacccatttagcatgacgacggttcagatttgtttgggtacgaatatgttttaaagcctcatgattagaatgaattatgaactcacgatgccaaagatagtgctgccatgtatgcaaagtgcgcactaaagcgtaaagctccttatcataagtagaatatttcagactagcaccgcttaatttttcactaaaataagcaactggttttccttcttgtaacaaaacagcacctagcccaataccgctagcatcgcattcatgctcaaaaactttattaaaatcaggcaattgcaagaggggagcttgggttaacttatctttcaaagtgctgaacgctacctcctgcgaatcactccaagcaaacggcacatctttctttgtaagctcatgtagaggcgctgcaatggagctaaaatcacgaacaaatctgcggtagaaaccggcaagtccaagaaagctccgaatttgtgtgaccgtcgtcggtgtaggccactcccgaatggcagcaatcttgctgctatccacctcaatgccctgcggagtaaccacataaccaagaaacgagacacgttgcgtgcaaaatgtgcacttttccatgttaccaaacaagcgagcagcacgcaaagcatcaaaaacagcacgcaaatgttctaaatgctcctctatagacttgctgtaaataaggatatcatcgaaataaacaacaacaaacaaacctatgaaggcccgtagaacttcgttcattaaacgcataaaggtgctgggagcattagtcaatccaaatggcataaccaaccattcatataaaccaaatttcgttttaaaagccgttttccattcatcaccgagtttcattctaatctgatggtaaccgctacgcaaatcaaccttagagaaaataacggcaccactaagctcatctaacatatcatcaaggcgtggaataggatatcgataacgaactgtgatgttattaatagcacgacaatctacgcacatacgccatgacccatctttctttggaacgagtaaaacaggaaccgagcaagggctaagagactcacgaatgtaacccttatcaagcagcgtctgcacctggcgctggatctccttcgtctcctctggatttgtacggtacggggcgcggttcggaagagaagcgtcagggatgagatcgatctgatgctcaatgccacggaggggaggaagacccggtggtaagtccgtaggataaacatcagcatactcctgcaaaaggttaacaacagcagggggtatatccaaagacggtgcatcatcaagcggaacaagcatgcgcgagcatacaagtgcataacagggcatatgagcttcatggagatcatcaaaatcagcacgtgtagcaagtaaaacaggagagtgcaacttgatttcagatttaataggtgcggctgatgtcgatttgacttgttgtgcagttttagcagccctagtaagatcatctttcaaaatttggtcaggggtcattggatgtataattattttctggcctttaaacatgaaagaataatgatttgaacgaccatgatgtaaactatcagtatcatattgccaaggtcgacccaataacaaaaagcatgcttccataggaataacatcgcaatcagcataatcagaataagaacccagcgaaaaggggacacgtaccgaacgtgttacctttattttaccaccatcattaagccattgaatgtgatacggatgtggatgtgtgtgagtgggcaaggataatttctctaccaacgctgtactagccaaattgttgcagctgccactatcgatgatgatgcgaatcgaccgttcgtgcacgacgcccttggtatggaatagagtgtgtcgctgatttttttcggcctgggcaacctgtgtgctgagaacacgctgcacaacaagactctcatacctatcggcgtcgatgggatcaacgtggacttcctcattttctgcatggttagtggcaatcatagtatgactagtttcctcagaatcactggctgaagagtactcaccattgtcacgtataagcaaggtacgcttgtttgggcagtcccgaatcatatgtccaaaccctctgcaacgatggcactgaatatcccgtgtacgtcctgtggaagaagcggcgcctttggcagggggcgccactggcttggtcgtccctgtgcgcgatgtagtgctaggcgtaggaggtgcagggctggaaggagttgagctgtgtgttggaccccggcctgcaagagagttagtatatgtctttgatcgtcgtccctgcacttcacgttcagctttgcaagcatattcaaacaatgtggttatatcaaaataatccttataatcaagtatatcctgaatttccctgtttaaaccaccacgaaaacgcgccatagcagcgtcatccgactcaaccaaaccacaacgaagcatacccttttgtaactcctggtaatattcctcaacaggctgtgaaccttgttgaaaacgctgcattttgttaagcaaatcacgagcataataggaaggaacaaatctgtggcgcatggcagtttttaattgggtccaagtaatgacactgttaatgggaagtttttgtttatactcacgccaccaaattaaagcaaaatcagtaaattcactaatggcagccttcacttggctattagcaggaatatcatggcatgaaaatttctgttctacctctaattcccaatcaaaatatgcagcaggatcatatttaccattaaaagatggaattttaaatttaatcttagaaaataagtcattagggggatgacgaaccacacgacgtgcacgaccacggcgatctccatcgtcctgctcagtgtcaccgtcgtattcctgctccatctttgtggtcaaggcatcaaggcgtgccaggatggtgtcgagtgtggtgcgagtcgccgtttgagcaaggtcaagttggttgaaacgctcggtcgtcgaagtgatcgttgaatcaagccgttcatgcatcgtcctaatgtcagcagcaagtccatcaacttgtccccttacttcttgcaactgggcatccaccatgtcgtgtgctcctgccatagttagtgcaaacaccaaaacaccaaaaggagaaaaaaaaccaacgacaaaaacaggggtgtactgctcacaaggcgctcacactagagatgttatcaagttcttatccgttcttaccaagccatagtggtgaactgcaatcaacaggtggaaccggtgaaagattggatgagcgattgcgtggagaaacagaaacctgctcgtcgtagaaatatgtggagttgtgggtaggctgcactaaagtcaaggattagcacgatcaaacaataatgcaaagttgaattatagtgcaaaacacgaaactatattgctggccacaggtgcaaaggatggatggaactagcagaatggcagtaacgtaaatattgtactagtgatgccaaaaaggcactagtagaaatcacaggtgatgttgtttttcttttttgtacgatttttttgatatttttcttagcacaagaagcaacaagataggagctacacgaagtttcacctaaaacagatatcagatgtggtctacagaaaatcaggaagttctctgaaaagcgtgcgagaactttgacgaatttttttctttattttccagaatttttttgacaattttgtcgaaaccaaacagatcgaaggtgagtttggccggcctcagaatggtgtcaacaagctcctgtaaaaatttcagattttttggacacccgagcgaaaagttatgcccggtttacggaaggtacctcaagttatgttttaaaaacgaccgggatgaaacaaccgtatcctttctccttcgttttcttttttttgtttctgttttttttatgtaaccgaaggagaaaaacaaggaagcggtcgttgactcggtttatttttttttctgttttttttcgtaaccgaaggagaaaatcaaggaaacggccgttgactcggtttgttttttctgttttttttgacgtaaccgaaggagaaaaacaaggaaacaatgttgactcggtttgtggcgtgatcaaacgggagatggtggcggcgctagggtttgaatggtggaagaacacaatgcaaccagcaacaaatgacacgaaagcacacaaattcaacaatgcagattattgaaagaaagtgcgaggctcaaaagggtgctgggataagatctaacctgaatttttatgtggttttgtcgactgtaggaaaaaaacgctcgataaactcaccgatcaacctggaaatctgataccaattgatgtagctgaggtgcccgatctttcggcgagtagagataattccgatttggtggaagatgacccttgcgatccgactacgacgagcaagcccgaggcgccaatgcaatcgctgaaccaactccctgtggttaccgaccttgctgatgcgagatcggcctgatcacgaagatcgtttcctgtgcgcaatcgaagaacgaacaagaaaaagaggcgagcaatctaatctattactcgagggtggagttctgaatacacgaagacagcgcagatttgcgcgtgttcgagagtagctaaggctaacgtaaaacaaaactcggaaaataaaggaagcgcagctcctgaataaatagagagggggcgcagcccctaggggcggccaaccctaggtcgtccattatgggccgcaattgggctggtcgtctattcttccgggccttcgttctttaacaacatgatgtagttcaattctcttgcacgggcccgagtcactggcccaggtggaaggggtggcgcctgggctagagaaggtgctgctggtgtagatgtgctcgtgttggtgttgatgtccgcatcacctccttcacccgtatccagtgtcgcttccaccgctcagggttaagcagtcacttcgacacttttaggcggatagaaacctatgcgagcttagaaatatcacattttggactaggcttatgggtactttcccctgattgatgtaaccctgtaaacttttgaaatctgtggaccttttgtcaccatgttatcttcatttcgaacctaatattatgattatggcatttttccttccatatgaaatgatatcttgccgttcaaaattgtgagttgggataacaatggcgacaatctctgttttcagatggcagctaggcagcgtcgcgggcataacgagcaggttcccctgccacctcctccagctcccacagtgcaggagctgatggcccagcagaatgagattctgcgacagctcttgcagcgtcagccccaccctcagcagcatggtggaggacagcatcagcgacctccggctatggcaacttaccaggagtttctgagcacgcagccgcccttgttcaccaaggcagaggatccgttggacgccgacgtatggcttcgcgtcgtcgagtccaagtttcccctcctcgcaggagtctgccctgatgaggccaaggctcgcttcgccgcgcagcagcttcgtggcccagctcggacttggtgggaccactttcgtgctatgctccccgctgatcgtgaggtatcttgggaggaattcaagattgccttcagatgacaccacatcccagctgacattcttgatcggaagctgaatgaatttctggcccttaatcaaggaacccgcacggtactgcagtatgcgcaagccttcaatgacttatgccagtatgcagggtatcatgctgattctgatgagaagaagagggatcgcttccgcaggggtctcaataccaagctgcgggaacgactcaacactgtccgggctgatagcttcaatgagttggtcaacatggccatctcacaggaggattgcattgttgctcaccgggcagagaagaagagaaaggcaccaatggcagcaccatccgctcaggctcagaggttccggattgtttctcacaatcagagtaggggttttcagcagcaggcaggcagatgggtgatcaggccacctcagcagcagcagcagccgacacccaaccgctacccagctcccgctccaaggaacaatcagcctccgcagcagcagcagttccgccagggcaatgggaacaagtgtttcacttgtggtaatgtgggccactatgccaagaattgtcccaggaaccagcagaagcagatgccagcaccaaatcaagacaagggaagaaagcagaaggtgcaagtcaggcaagggaagctcaacttcactactctggaggaagtacctgaaggagctcctatcatgaccggtaccttttcagtttataatcaacctactttaattctgtttgattctggtgcatctcatagtttcattagccaaaagttcagtgctagatgcaaactgccattctctcactcaaaagggtcattcatgatagtcacacctaggggtaaaattgcaactaatcaattaaaccaaagtgtgcctattcaactgggaagccacattgtcaaaaccactcttcttgtgttgggattggaaaatgtggacattattctaggggcaaattggatgaccttgcaccaagttgtgcttgatgtagccagtcgtaccgtggaagttaattctcctttctgcgggaatttcactttgattctgcctagttagggttcttctcagtcatgtgctttctctatgacggagttacccctgaagaagatcccagtggtctgtgagtatgcagatgtcttccctgatgaattgccaggaatgccaccagaccgggatgttgaattcgccatcgagttgcaaccgggaacgaccccaatttccaagaggccctaccgaatgccacccgctgagttggcagagttgaagaagcagttgcaagaattgctggataagggtttcattcgcccaagcacttcgccttggggatgtccagcactatttgtgaagaagaaggatgaaagcttgaggctgtgtatagattaccgccctcttaatgcggtaactatcaagaacaagtatcctttgcctcgtattgatgttctctttgaccagttggtcggggccaaggtgttttccaagatagaccttcgctctggctaccatcagatcaaaatacgagcaagtgatattccgaagacggcattctcaaccagatatgggcattatgaattcttggtgatgtcatttgggctgacaaatgcaccagcatatttcatgtatctgatgaattctgttttcatgccggaattggacaagttcgtggtggttttcatcgatgacattctggtgttctcaaagaacgaagaagaacatgccgggcatttgcatgtagtgcttcaacgtctgcgagagcaccacctttatgccaagttatccaagtgtgatttttggctaaaggaaatcaaattcttgggtcacactatctctcaggctggaatagctgttgatcctgataaagtacaagaagtgatgaattggaggccaccaacaactgttcgccagattcggagttttctgggattagctagttattaccgaaggtttattccggacttctctcgaattgcgaagcctattactgagttgctgaagaaagaagtcaaatttgtgtggagtcagaagtgcgaagatgccttccatgcattaaggcagcatctgaccacagcaccagtattggcgcaacctgacagcagcaagccttttgatgtgtattgcgatgcctctagcaccgggctaggttgtgtcttgatgcaagacaaccgagtcattgcttatgcctcgagagcactcaggcctcatgagcaaaactatcccactcatgaccttgagttagcagcagtggttcatgcattgaagatgtggaggcactatctaatgggaacccactgcaacatcttcactgatcataagagccttaagtacatttttactcagactgatctcaacatgaggcagagaagatggctagagctgatcaaggattatgacctggaggtacattatcacctaggaaaagctaatgtggtagcagatgccttgagtcagaagttgcaatgcaattgtattctgatggattctcgcattaacaccttgtgtgatgagttgagcaagatgcaagttgaagtgattccttctggttctttgtctcacatttctgttgagccagctttgcaagaccagattatcatggcccagctcagtgacaagggagtgcagattatcaaaaagaatctccatcagaaggttgagaagtataattgtttccaccaggatgagaagggtgtgttatggttcaaaagcagattggtgattcctaaggaccaggatctcaagaggaaaattttggatgaggctcatctctccaaattctctatgcacccgggaagcaccaagatgtaccatgatctgaagcctttgtactggtggaccagaatgaagagggagatagcccagtatgtatcaaagtgtgacacctgtcagaggataaaggcaagccacttgaagtcagctggagctttgcaaccactgtccgtaccttcgtggaagtgggatgacatcatcatggatttcattgtgggtctgcccaacacctctcgtcatcatgattcgatttgggttattgtggaccgattgacgaaagtggcacattttcttcctgtgcacaccactgataaggctcagaaatatgcagaattgtatattgaccggatcgtgtgtttgcacggattacctcggaccattgtttctgaccgaggagcccaatttgttgccagattttgggaacaattgcaagagtctttgggaaccaagctaatcaggagttcagcttaccacccacagactgatggtcagacggaaagggtaaaccaaatcctgaaggatatgctgagagcttgtgcgatcgattgtggcaagaactgggataagcacctctccttggcagagtttgcttataacaatagttatcaatccagcctaaagatggcaccttttgaagctctctatggaaaaaggtgtaggacaccactcaattggtctcaacctggtgaaagagaagtttttggacctgatttagtgactgaagctgaaaggaaggtcaagctaatcaggaagaatctag
